United States Patent Application Publication US 2006/0048240 A1 - sequence listing, part 9

SEQ ID NO: 31566 - DNA, 2460 bp, Arabidopsis thaliana
  misc_feature (1)..(2460): Ceres Seq. ID no. 13588113
atcttactctctctggttctttctactagatccggatctggaactttctctactctctgctcataaagtttcattctttggggagatctgaggcaaccctttttctctggtgcatgtgactagggattgtgccgtgggtttaggatcatggcaatggggaagtattctcgtgtagacgggaagaagtcatcgggatatggcttaaccattaccatcgttttaattgtttctctatgtttggttggggcgtggatgttcatgtcttcatggtctgctccaactgagtctattgacttctctgcaaacgagaggacaaaagatgtagatactactaagagtgatttcaaaagtgaagaggttgatcgaggttccaagagttttccggatgaaaagaatgaggagacggaggttgtgacagagaccaacgaagagaagactgatcctgagaaatctggtgaggagaactctggtgagaaaacggagtcggctgaggaaagaaaggagtttgatgacaaaaatggtgatggggatagaaaaaatggagacggtgagaaagacacggaatcagaaagtgatgaaaccaagcaaaaagagaaaacacaactggaagagagctcagaagaaaacaaatctgaggatagtaatggaaccgaagagaatgctggtgaatctgaagaaaacaccgagaagaagtcagaagaaaacgctggtgaaactgaagagagcactgagaagagtaaggatgttttcccagctggtgaccaggctgaaatcacaaaggagtcaagcactggaagtggggcttggtctacccaattggtggaatcccagaacgagaagaaagcacaagtgtcctcaattaaatggaaagtctgcaatgtgacagctggaccagactacatcccttgccttgacaattggcaagctatcagaaagcttcattcgacaaagcattatgaacatcgtgagaggcattgtcccgaggagtctccacgctgccttgtttctcttcccgaagggtataagcgatccatcaagtggcctaagagcagagaaaagatctggtacaccaatattccacacaccaagcttgcagaagtcaagggacatcaaaactgggtgaagatgagtggtgaatacttaacattccctggtggaggtactcaattcaagaatggtgctcttcactacattgatttcctccaagagtcatatcctgatattgcttggggaaataggactcgtgttatattggatgttgggtgtggggttgctagctttgggggatatctttttgacagagatgtactcgctttgtcatttgcacccaaagacgaacacgaggcacaggtgcaatttgctctggaacgtggtattcctgcaatgtcaaatgttatgggaaccaagagattaccttttccaggatctgtttttgaccttatccattgtgctcgttgtagagttccttggcatatcgaaggtggtaaactacttttggagttgaaccgtgcattgaggccgggtggtttctttgtctggtcagcgactccagtctataggaagactgaggaagatgttggcatatggaaagctatgtcgaagctaacaaaggcaatgtgctgggaactgatgacgattaagaaagatgaactgaatgaagttggtgctgccatttaccagaagccaatgtcgaataaatgctacaatgaaagatctcaaaatgagccacctctctgcaaagactctgatgatcaaaatgccgcctggaatgttccacttgaggcatgtattcacaaagtaacagaagattcatcaaaacgcggagcagtttggcctgaaagttggccggaaagagtggagacggttcctcagtggttagattctcaggaaggagtatatggaaaacctgcacaagaggatttcacagcagaccatgaacgctggaagactattgtttcaaagtcatacctcaacggtatgggaatcgattggtcttatgttagaaatgtgatggacatgagagcagtctatggaggttttgctgctgcattgaaggatctgaaactgtgggtgatgaatgtagttcctatcgactcacctgatacccttccgattatatacgaacgtggtttgtttggaatctatcatgattggtgtgaatcattcagcacttaccctcggacttacgacctccttcacgctgatcatcttttctcttcactgaaaaagaggtgcaacttggtgggcgtgatggctgaagtagaccggattcttagaccacaaggaactttcatagtaagagatgacatggaaacgataggagaaattgagaagatggtgaaatcgatgaaatggaatgtaagaatgacacattccaaagatggagaaggattgctctctgttcagaagtcatggtggcgtcctacagaggccgagaccattcagtcggcaatagcttga

SEQ ID NO: 31567 - protein, 770 aa, Arabidopsis thaliana
  misc_feature (1)..(770): Ceres Seq. ID no. 13588114
MAMGKYSRVDGKKSSGYGLTITIVLIVSLCLVGAWMFMSSWSAPTESIDFSANERTKDVDTTKSDFKSEEVDRGSKSFPDEKNEETEVVTETNEEKTDPEKSGEENSGEKTESAEERKEFDDKNGDGDRKNGDGEKDTESESDETKQKEKTQLEESSEENKSEDSNGTEENAGESEENTEKKSEENAGETEESTEKSKDVFPAGDQAEITKESSTGSGAWSTQLVESQNEKKAQVSSIKWKVCNVTAGPDYIPCLDNWQAIRKLHSTKHYEHRERHCPEESPRCLVSLPEGYKRSIKWPKSREKIWYTNIPHTKLAEVKGHQNWVKMSGEYLTFPGGGTQFKNGALHYIDFLQESYPDIAWGNRTRVILDVGCGVASFGGYLFDRDVLALSFAPKDEHEAQVQFALERGIPAMSNVMGTKRLPFPGSVFDLIHCARCRVPWHIEGGKLLLELNRALRPGGFFVWSATPVYRKTEEDVGIWKAMSKLTKAMCWELMTIKKDELNEVGAAIYQKPMSNKCYNERSQNEPPLCKDSDDQNAAWNVPLEACIHKVTEDSSKRGAVWPESWPERVETVPQWLDSQEGVYGKPAQEDFTADHERWKTIVSKSYLNGMGIDWSYVRNVMDMRAVYGGFAAALKDLKLWVMNVVPIDSPDTLPIIYERGLFGIYHDWCESFSTYPRTYDLLHADHLFSSLKKRCNLVGVMAEVDRILRPQGTFIVRDDMETIGEIEKMVKSMKWNVRMTHSKDGEGLLSVQKSWWRPTEAETIQSAIA

SEQ ID NO: 31568 - protein, 768 aa, Arabidopsis thaliana; identical to SEQ ID NO: 29644
  misc_feature (1)..(768): Ceres Seq. ID no. 13588115

SEQ ID NO: 31569 - protein, 735 aa, Arabidopsis thaliana; identical to SEQ ID NO: 29645
  misc_feature (1)..(735): Ceres Seq. ID no. 13588116

SEQ ID NO: 31570 - DNA, 1589 bp, Arabidopsis thaliana
  misc_feature (1)..(1589): Ceres Seq. ID no. 13588147
gacgtgcttattaccactagcgagcgttatcgcttcgcagattcagtcaaaaacaagaaacaggagcttgtcttctccccgagattagaagaaggactaacatgaaatttgagcttgttttcatcccctatcccggaatcggtcatctccgatcaacggtagaaatggcaaagctactagtggaccgtgaaactcgtctctctatctccgttatcatccttcctttcatttccgaaggcgaagtcggtgcttccgattacatcgcagccctctccgcctcatccaacaaccgcctccgctacgaagttatctccgccgtagatcaaccaaccatcgagatgacgacaattgaaatccatatgaagaaccaagaaccaaaggtgagaagcaccgttgcaaaactccttgaagactattcgtctaaaccggactcgccgaagatcgctggctttgttctagacatgttttgcacttcgatggtagatgtagcgaacgagtttggtttcccgagttatatgttttacacctccagtgccgggattctctcagttacatatcatgttcaaatgttgtgcgatgagaacaagtacgatgttagtgaaaatgattatgcagactcggaagctgtgttgaactttccgagtttgagtcgtccttatccggtgaagtgtcttcctcacgctctggcagctaatatgtggctcccggtgtttgtaaaccaagcgagaaagtttagggagatgaaaggtattttggtaaatactgttgctgagcttgaaccttatgtgttaaagtttctttctagtagtgatactcctcctgtttatcctgttggaccattgttgcatcttgagaaccaacgtgatgattctaaggacgagaaacggttggagattatacggtggttggatcagcaaccaccaagttcggttgtgtttctctgctttgggagcatgggaggcttcggtgaggaacaagtaagagagatcgcaatcgcgttagagcgaagtgggcaccggtttctctggtctcttcgtcgcgcatctccgaatatattcaaagaacttccaggagagtttactaatctagaggaagttctcccggaaggattctttgatcgaacgaaagatataggtaaagtgattggatgggctccacaagtagccgttcttgcgaatccggctataggaggtttcgtaactcattgcgggtggaattctacgctagagagtctttggtttggtgttccaacagctgcatggccgttatacgcagagcagaagttcaatgctttcttaatggtggaggagcttggattggcggtggagataaggaagtattggcgaggtgaacatttggcgggattaccgacggctactgtgacagcggaggagatagagaaagcaatcatgtgtctaatggaacaagatagtgacgtgaggaaaagagtgaaggatatgagcgagaaatgccatgtggctttaatggatggtggatcgtcgcgtactgcgttgcaaaagtttattgaagaggttgcgaagaatatagtttcactagataaggaatttgagcatgtagctcttaaatga

SEQ ID NO: 31571 - protein, 495 aa, Arabidopsis thaliana
  misc_feature (1)..(495): Ceres Seq. ID no. 13588148
MKFELVFIPYPGIGHLRSTVEMAKLLVDRETRLSISVIILPFISEGEVGASDYIAALSASSNNRLRYEVISAVDQPTIEMTTIEIHMKNQEPKVRSTVAKLLEDYSSKPDSPKIAGFVLDMFCTSMVDVANEFGFPSYMFYTSSAGILSVTYHVQMLCDENKYDVSENDYADSEAVLNFPSLSRPYPVKCLPHALAANMWLPVFVNQARKFREMKGILVNTVAELEPYVLKFLSSSDTPPVYPVGPLLHLENQRDDSKDEKRLEIIRWLDQQPPSSVVFLCFGSMGGFGEEQVREIAIALERSGHRFLWSLRRASPNIFKELPGEFTNLEEVLPEGFFDRTKDIGKVIGWAPQVAVLANPAIGGFVTHCGWNSTLESLWFGVPTAAWPLYAEQKFNAFLMVEELGLAVEIRKYWRGEHLAGLPTATVTAEEIEKAIMCLMEQDSDVRKRVKDMSEKCHVALMDGGSSRTALQKFIEEVAKNIVSLDKEFEHVALK

SEQ ID NO: 31572 - protein, 474 aa, Arabidopsis thaliana
  misc_feature (1)..(474): Ceres Seq. ID no. 13588149
MAKLLVDRETRLSISVIILPFISEGEVGASDYIAALSASSNNRLRYEVISAVDQPTIEMTTIEIHMKNQEPKVRSTVAKLLEDYSSKPDSPKIAGFVLDMFCTSMVDVANEFGFPSYMFYTSSAGILSVTYHVQMLCDENKYDVSENDYADSEAVLNFPSLSRPYPVKCLPHALAANMWLPVFVNQARKFREMKGILVNTVAELEPYVLKFLSSSDTPPVYPVGPLLHLENQRDDSKDEKRLEIIRWLDQQPPSSVVFLCFGSMGGFGEEQVREIAIALERSGHRFLWSLRRASPNIFKELPGEFTNLEEVLPEGFFDRTKDIGKVIGWAPQVAVLANPAIGGFVTHCGWNSTLESLWFGVPTAAWPLYAEQKFNAFLMVEELGLAVEIRKYWRGEHLAGLPTATVTAEEIEKAIMCLMEQDSDVRKRVKDMSEKCHVALMDGGSSRTALQKFIEEVAKNIVSLDKEFEHVALK

SEQ ID NO: 31573 - protein, 416 aa, Arabidopsis thaliana
  misc_feature (1)..(416): Ceres Seq. ID no. 13588150
MTTIEIHMKNQEPKVRSTVAKLLEDYSSKPDSPKIAGFVLDMFCTSMVDVANEFGFPSYMFYTSSAGILSVTYHVQMLCDENKYDVSENDYADSEAVLNFPSLSRPYPVKCLPHALAANMWLPVFVNQARKFREMKGILVNTVAELEPYVLKFLSSSDTPPVYPVGPLLHLENQRDDSKDEKRLEIIRWLDQQPPSSVVFLCFGSMGGFGEEQVREIAIALERSGHRFLWSLRRASPNIFKELPGEFTNLEEVLPEGFFDRTKDIGKVIGWAPQVAVLANPAIGGFVTHCGWNSTLESLWFGVPTAAWPLYAEQKFNAFLMVEELGLAVEIRKYWRGEHLAGLPTATVTAEEIEKAIMCLMEQDSDVRKRVKDMSEKCHVALMDGGSSRTALQKFIEEVAKNIVSLDKEFEHVALK

SEQ ID NO: 31574 - DNA, 1182 bp, Arabidopsis thaliana
  misc_feature (1)..(1182): Ceres Seq. ID no. 13588151
acaaaacctcttagagagcattcactttcaagaagaaaaaaacaagcagacaagaaaatgggatgtttcggaccatcaaaggcttcaagaacaagaaacaatgaacatgacaagatgacacgacaaaacccctctcatcaacctcaaaccatgagagctgaagaagttctgttgcagattcctagatgtagagtccatctcataggcgaatccgaggcggtggagcttgcctctggtgatttcaagctcgttaaggtctcagacaacggtgtaactctagctatgatcgtgagaatcggacatgaccttcagtggccagtgattagagatgagccagtggtaaaacttgacgcccgtgattacctcttcactctcccggttaaagacggtgatccacttagctacggggtcactttctctggcgatgacagagacgtagccctcgtgaacagtctgaagttgcttgaccaattcttgagtgagaattcttgtttctcgtctacggcttcgagtaaggttaacaatggaatcgactggcaagagtttgcgccgaggattgaagattacaacaacgttgttgctaaggctattgctggaggaacaggacatatcattagaggaatctttagtctcagtaatgcttactctaaccaggttcacaagggaggcgacataatgattacaaaggctgaggagagccagagaaatggaagttacaacaatggaaactccagtggtaatgagaagaaaaatgggatcaacacacaccttcaacgagtgaggaagctgtcaaaggcgactgagaatctgagcaagacgatgttgaatggtgcgggagttgtgagcggctctgtgatggtccctatgatgaagtcgaaaccagggatggccttcttttcgatggttccaggggaggtcctcttagcttcacttgatgcccttaataaaatactagatgcaactgaagctgcagagagacaaactctatctgcaacatccagggctgctaccagaatggtcagtgagaggtttggagataacgcaggggaggccaccggagatgttctagcaacagcgggccacgcagctggaactgcctggaatgttctcaagatccgtaagactttctatccttcatcttctcttacatcaggaatcgtcaaaaatgctccaagaaagtga

SEQ ID NO: 31575 - protein, 393 aa, Arabidopsis thaliana
  misc_feature (1)..(393): Ceres Seq. ID no. 13588152
TKPLREHSLSRRKKQADKKMGCFGPSKASRTRNNEHDKMTRQNPSHQPQTMRAEEVLLQIPRCRVHLIGESEAVELASGDFKLVKVSDNGVTLAMIVRIGHDLQWPVIRDEPVVKLDARDYLFTLPVKDGDPLSYGVTFSGDDRDVALVNSLKLLDQFLSENSCFSSTASSKVNNGIDWQEFAPRIEDYNNVVAKAIAGGTGHIIRGIFSLSNAYSNQVHKGGDIMITKAEESQRNGSYNNGNSSGNEKKNGINTHLQRVRKLSKATENLSKTMLNGAGVVSGSVMVPMMKSKPGMAFFSMVPGEVLLASLDALNKILDATEAAERQTLSATSRAATRMVSERFGDNAGEATGDVLATAGHAAGTAWNVLKIRKTFYPSSSLTSGIVKNAPRK

SEQ ID NO: 31576 - protein, 374 aa, Arabidopsis thaliana
  misc_feature (1)..(374): Ceres Seq. ID no. 13588153
MGCFGPSKASRTRNNEHDKMTRQNPSHQPQTMRAEEVLLQIPRCRVHLIGESEAVELASGDFKLVKVSDNGVTLAMIVRIGHDLQWPVIRDEPVVKLDARDYLFTLPVKDGDPLSYGVTFSGDDRDVALVNSLKLLDQFLSENSCFSSTASSKVNNGIDWQEFAPRIEDYNNVVAKAIAGGTGHIIRGIFSLSNAYSNQVHKGGDIMITKAEESQRNGSYNNGNSSGNEKKNGINTHLQRVRKLSKATENLSKTMLNGAGVVSGSVMVPMMKSKPGMAFFSMVPGEVLLASLDALNKILDATEAAERQTLSATSRAATRMVSERFGDNAGEATGDVLATAGHAAGTAWNVLKIRKTFYPSSSLTSGIVKNAPRK

SEQ ID NO: 31577 - protein, 355 aa, Arabidopsis thaliana
  misc_feature (1)..(355): Ceres Seq. ID no. 13588154
MTRQNPSHQPQTMRAEEVLLQIPRCRVHLIGESEAVELASGDFKLVKVSDNGVTLAMIVRIGHDLQWPVIRDEPVVKLDARDYLFTLPVKDGDPLSYGVTFSGDDRDVALVNSLKLLDQFLSENSCFSSTASSKVNNGIDWQEFAPRIEDYNNVVAKAIAGGTGHIIRGIFSLSNAYSNQVHKGGDIMITKAEESQRNGSYNNGNSSGNEKKNGINTHLQRVRKLSKATENLSKTMLNGAGVVSGSVMVPMMKSKPGMAFFSMVPGEVLLASLDALNKILDATEAAERQTLSATSRAATRMVSERFGDNAGEATGDVLATAGHAAGTAWNVLKIRKTFYPSSSLTSGIVKNAPRK

SEQ ID NO: 31578 - DNA, 1627 bp, Arabidopsis thaliana
  misc_feature (1)..(1627): Ceres Seq. ID no. 13588164
atctctactttgacccgaccagcgaaagtgtaaattgaaagatagatagaaagaaagagccaactttaaaagcttagcggttgatttcgaaatctcgtcgccggcgcgtggagtcttttcgtcggacaacaacaagagaaaagagatttgtggtgttcttctgcttagaattgttgttttccatctccggcagtgagatttggtggagaattttgatttgtgatcgatggttaaggaaacagagtactacgatgtgctcggagttagcccaactgctacagaatctgagattaagaaagcttactacataaaggcacgccaagttcatcctgataagaaccctaatgatcctcaagctgcacacaatttccaggtcttgggagaggcctatcaagtgctaagtgattcaggacaacgccaagcttatgatgcatgtggcaagtcaggaatctcaactgatgcaatcatcgatcctgctgcaatatttgcaatgctatttggcagcgaactttttgaagggtacataggacagcttgctatggcatctatggcttcacttgatatcttcacggaaggggatcagtttgataccaaaaagatacaagaaaaattgaggattgttcagaaagaaagagaagacaagcttgctcagattctgaaagaccgactcaacgaatatgtaataaacaaagacgaatttatcagtaatgctgaagctgaagtagcaagactctcaaatgcagcttatggtgtggatatgttgaatacaattgggtatatatatgtaagacaagcagcaaaagagctagggaagaaagctatttatctcggagtaccattcattgctgaatggtttaggaacaaaggtcacttcatcaaatctcaattaacagctgcaacaggcgcatatgcgttgttccagttgcaggaggaaatgaaaaggcagctaaatactgaaggaaattatactgaggaggaacttgaggaataccttcaggcccataaaagagtgatgattgattcactgtggaagctcaatgtcgctgatatcgaagccactctttgtcgtgtttgtcagctggttcttcaagatccagaagccaaaagagaggagcttcgtacaagagcaagaggtttaaaagctctggggaggatctttcagagagccaaaacagctagtgagagtgatcctttagaaaatagtgaacctcaaaagttaaacggaaatggaaagaaccacgatgaggatacttctacatcaccaaaatccagtgaagcatctcactccacctctggtcctcaggaaccacaaagcccctacgtggaagaattcaaacttggagatgaacaattcaactattacttcccacgaccagcgccacctcctggcgcagggaaatactcttcctctggctatgattgattcaggtgagatcggggcatatatatatcagtcttagcatatttctattgcagttgtgtaccattatgtaaaattattccttttttcttttggttttggcttgttagaagaaaatgattgatgttgaaagcacatataaaagctcttttgtgataatgtatccatgtaaattattatgaaggtataatgacttagagtataaac

SEQ ID NO: 31579 - protein, 398 aa, Arabidopsis thaliana
  misc_feature (1)..(398): Ceres Seq. ID no. 13588165
MVKETEYYDVLGVSPTATESEIKKAYYIKARQVHPDKNPNDPQAAHNFQVLGEAYQVLSDSGQRQAYDACGKSGISTDAIIDPAAIFAMLFGSELFEGYIGQLAMASMASLDIFTEGDQFDTKKIQEKLRIVQKEREDKLAQILKDRLNEYVINKDEFISNAEAEVARLSNAAYGVDMLNTIGYIYVRQAAKELGKKAIYLGVPFIAEWFRNKGHFIKSQLTAATGAYALFQLQEEMKRQLNTEGNYTEEELEEYLQAHKRVMIDSLWKLNVADIEATLCRVCQLVLQDPEAKREELRTRARGLKALGRIFQRAKTASESDPLENSEPQKLNGNGKNHDEDTSTSPKSSEASHSTSGPQEPQSPYVEEFKLGDEQFNYYFPRPAPPPGAGKYSSSGYD

SEQ ID NO: 31580 - protein, 310 aa, Arabidopsis thaliana
  misc_feature (1)..(310): Ceres Seq. ID no. 13588166
MLFGSELFEGYIGQLAMASMASLDIFTEGDQFDTKKIQEKLRIVQKEREDKLAQILKDRLNEYVINKDEFISNAEAEVARLSNAAYGVDMLNTIGYIYVRQAAKELGKKAIYLGVPFIAEWFRNKGHFIKSQLTAATGAYALFQLQEEMKRQLNTEGNYTEEELEEYLQAHKRVMIDSLWKLNVADIEATLCRVCQLVLQDPEAKREELRTRARGLKALGRIFQRAKTASESDPLENSEPQKLNGNGKNHDEDTSTSPKSSEASHSTSGPQEPQSPYVEEFKLGDEQFNYYFPRPAPPPGAGKYSSSGYD

SEQ ID NO: 31581 - protein, 294 aa, Arabidopsis thaliana
  misc_feature (1)..(294): Ceres Seq. ID no. 13588167
MASMASLDIFTEGDQFDTKKIQEKLRIVQKEREDKLAQILKDRLNEYVINKDEFISNAEAEVARLSNAAYGVDMLNTIGYIYVRQAAKELGKKAIYLGVPFIAEWFRNKGHFIKSQLTAATGAYALFQLQEEMKRQLNTEGNYTEEELEEYLQAHKRVMIDSLWKLNVADIEATLCRVCQLVLQDPEAKREELRTRARGLKALGRIFQRAKTASESDPLENSEPQKLNGNGKNHDEDTSTSPKSSEASHSTSGPQEPQSPYVEEFKLGDEQFNYYFPRPAPPPGAGKYSSSGYD

SEQ ID NO: 31582 - DNA, 1793 bp, Arabidopsis thaliana
  misc_feature (1)..(1793): Ceres Seq. ID no. 13588172
tcatcttccacatctcaaggagacacccaaaaagaaaaaccaaacctttgaagaacgaaaagggttattaaaaaagcaacaaactttgagagtaacaaagaaaaagtagttatcatggcggcattggaggagctaaagaagaagctgtctccattgtttgatgctgagaagggtttttcttcatcttcatctttggatccaaacgattcatatttattatctgatggtgggactgtgaatttacttagtagatcatatggagtttataattttaacgagctcgggttacaaaaatgtacatcttctcatgtggatgagtctgaaagttccgagacgacgtatcaatgtgcttctcacgaaatgcgggtttttggagctataggaagcggagctagcagcgttgttcaacgagctattcatatccctaatcatagaattttagcgttgaagaagattaatatctttgaaagggagaaaaggcagcaattgcttacagagatacggacattgtgtgaagctccttgtcatgaaggacttgtggattttcacggagcgttttatagtccagactcgggacaaatcagcatagctcttgaatatatgaatggaggatctcttgctgatattttaaaagtaacaaagaagatacctgagccggttctttcatcattgttccacaaacttttgcaaggattgagctacttgcatggagtgagacatcttgttcatagagacattaaacctgctaatttgcttataaatctcaaaggggaaccgaagataaccgattttggcataagtgctggccttgagaattcaatggctatgtgtgctacttttgttggaactgtcacctacatgtcaccagagaggataaggaatgacagttattcttatccagctgatatatggagccttggtctcgctctttttgaatgcggcactggagagtttccgtatatagctaatgaagggcctgttaatcttatgttgcagatattggatgatccttcaccaacaccaccaaaacaagaattctcaccagagttctgttccttcattgatgcttgcctccagaaggatccagatgctcgaccaacagctgaccagctcttgtcacacccttttattacaaaacacgagaaggaaagagtagatttggcgacttttgttcaaagcatctttgatccaactcagagattgaaagatttagctgatatgctcaccatacattattactccctctttgatggatttgatgatctttggcaccacgcaaaatcgctctacactgaaacttcagttttcagtttctctgggaaacataacacaggatcaactgaaatcttctcagcattatcagacattcgtaacacattaacaggagatttaccgagtgagaaacttgttcatgtcgttgagaagcttcattgcaaaccttgcggcagtggtggagtcataattcgtgctgttggatcgtttattgttggaaatcagtttctgatctgtggtgatggagtccaagcagaagggcttccgagtttcaaagatcttggcttcgatgtcgcaagtagacgtgttggccgatttcaagaacagtttgttgttgaatctggtgatcttattggaaagtattttcttgctaagcaagagctttatattacaaacttagattagataaacacacatgagaaaacgtttgttctctactgtactataatgtaactatgaacttgtttaattactaacatatgtaattgtatttgtttaaggttcataaaaagtgccggaat

SEQ ID NO: 31583 - protein, 520 aa, Arabidopsis thaliana
  misc_feature (1)..(520): Ceres Seq. ID no. 13588173
MAALEELKKKLSPLFDAEKGFSSSSSLDPNDSYLLSDGGTVNLLSRSYGVYNFNELGLQKCTSSHVDESESSETTYQCASHEMRVFGAIGSGASSVVQRAIHIPNHRILALKKINIFEREKRQQLLTEIRTLCEAPCHEGLVDFHGAFYSPDSGQISIALEYMNGGSLADILKVTKKIPEPVLSSLFHKLLQGLSYLHGVRHLVHRDIKPANLLINLKGEPKITDFGISAGLENSMAMCATFVGTVTYMSPERIRNDSYSYPADIWSLGLALFECGTGEFPYIANEGPVNLMLQILDDPSPTPPKQEFSPEFCSFIDACLQKDPDARPTADQLLSHPFITKHEKERVDLATFVQSIFDPTQRLKDLADMLTIHYYSLFDGFDDLWHHAKSLYTETSVFSFSGKHNTGSTEIFSALSDIRNTLTGDLPSEKLVHVVEKLHCKPCGSGGVIIRAVGSFIVGNQFLICGDGVQAEGLPSFKDLGFDVASRRVGRFQEQFVVESGDLIGKYFLAKQELYITNLD

SEQ ID NO: 31584 - protein, 438 aa, Arabidopsis thaliana
  misc_feature (1)..(438): Ceres Seq. ID no. 13588174
MRVFGAIGSGASSVVQRAIHIPNHRILALKKINIFEREKRQQLLTEIRTLCEAPCHEGLVDFHGAFYSPDSGQISIALEYMNGGSLADILKVTKKIPEPVLSSLFHKLLQGLSYLHGVRHLVHRDIKPANLLINLKGEPKITDFGISAGLENSMAMCATFVGTVTYMSPERIRNDSYSYPADIWSLGLALFECGTGEFPYIANEGPVNLMLQILDDPSPTPPKQEFSPEFCSFIDACLQKDPDARPTADQLLSHPFITKHEKERVDLATFVQSIFDPTQRLKDLADMLTIHYYSLFDGFDDLWHHAKSLYTETSVFSFSGKHNTGSTEIFSALSDIRNTLTGDLPSEKLVHVVEKLHCKPCGSGGVIIRAVGSFIVGNQFLICGDGVQAEGLPSFKDLGFDVASRRVGRFQEQFVVESGDLIGKYFLAKQELYITNLD

SEQ ID NO: 31585 - protein, 358 aa, Arabidopsis thaliana
  misc_feature (1)..(358): Ceres Seq. ID no. 13588175
MNGGSLADILKVTKKIPEPVLSSLFHKLLQGLSYLHGVRHLVHRDIKPANLLINLKGEPKITDFGISAGLENSMAMCATFVGTVTYMSPERIRNDSYSYPADIWSLGLALFECGTGEFPYIANEGPVNLMLQILDDPSPTPPKQEFSPEFCSFIDACLQKDPDARPTADQLLSHPFITKHEKERVDLATFVQSIFDPTQRLKDLADMLTIHYYSLFDGFDDLWHHAKSLYTETSVFSFSGKHNTGSTEIFSALSDIRNTLTGDLPSEKLVHVVEKLHCKPCGSGGVIIRAVGSFIVGNQFLICGDGVQAEGLPSFKDLGFDVASRRVGRFQEQFVVESGDLIGKYFLAKQELYITNLD

SEQ ID NO: 31586 - DNA, 1629 bp, Arabidopsis thaliana
  misc_feature (1)..(1629): Ceres Seq. ID no. 13588180
gacagcaattatatcaagtctctggtgaagtttttctggtctctaagtatgaagacaaagctcatgataacaatcttctcttgcttactactttggtcgatgttgttgttactatcattctccaacatcttcaaacaccagcttcttggtgctacaatcaacgtaggttcaaaggattctgtaaaaccgagggatagactgttaggaggacttttaaccgctgatttcgatgaagattcttgcttgagtaggtatcagtcttccttgtatcgcaagccttcgccttacagaacttctgaatatctaatctctaagcttagaaactatgagatgctccacaagcgttgcggtccaggcactgatgcttacaagagagcaacagagaagcttggtcatgatcatgagaatgttggagatagctctgatggtgaatgcaaatacattgtgtgggtggctgtttatgggcttggaaacagaatacttactcttgcttctgtgttcctctacgctctcttgacagagagaatcattcttgtggaccaacgcaaggatattagtgatctcttctgtgagccttttcctggtacttcatggttacttcctcttgattttccattgatgggtcagatagatagtttcaaccgggaatactcgcattgttacggaacaatgttgaagaatcataccattaactcgacaacaatcccatcacatctctatcttcatcttctccatgattacagggatcaagacaagatgttcttttgccaaaaggatcagtctttagtcgacaaagtcccttggctggttgtcaaatccaacctttactttattccatctctatggctgaatcctagtttccaaaccgaactaatcaagctattcccgcagaaagacaccgtcttctaccacctggctcggtatctttttcacccgacaaaccaagtctggggtatggtcaccagatcctacaatgcttacttatcaagagcagacgagatactagggattcaagtacgggttttcagcagacaaactaaatatttccagcacgtgatggaccaaatcgtagcatgtacacaaagagagaaactgttacctgaatttgctgcacaagaagaagcacaagtaactaatacatcaaatccctccaaacttaaagctgttctggttacatctctgaatccagaatactcaaataacctaaagaagatgtattgggaacacccaactacaacaggagacatagtagaagtttatcagccaagtagagaaaggtttcagcaaacagacaaaaagcttcacgaccaaaaggccctggcagagatgtacctcttaagcctaactgataagcttgtcacaagcgctttgtcaacatttggatatgtagctcaaggtcttggagggttaaagccatggatactctacacaccaaagaagttcaaatcccctaatccaccatgtggccgtgtcatctccatggagccttgtttccttacacctccagtacatggatgtgaagccaaaaagggaattaacactgcaaaaatcgttccttttgtaagacattgtgaagatcttagacactatgggcttaagctagttgatgataccaaaaatgagttatag

SEQ ID NO: 31587 - protein, 542 aa, Arabidopsis thaliana
  misc_feature (1)..(542): Ceres Seq. ID no. 13588181
DSNYIKSLVKFFWSLSMKTKLMITIFSCLLLWSMLLLLSFSNIFKHQLLGATINVGSKDSVKPRDRLLGGLLTADFDEDSCLSRYQSSLYRKPSPYRTSEYLISKLRNYEMLHKRCGPGTDAYKRATEKLGHDHENVGDSSDGECKYIVWVAVYGLGNRILTLASVFLYALLTERIILVDQRKDISDLFCEPFPGTSWLLPLDFPLMGQIDSFNREYSHCYGTMLKNHTINSTTIPSHLYLHLLHDYRDQDKMFFCQKDQSLVDKVPWLVVKSNLYFIPSLWLNPSFQTELIKLFPQKDTVFYHLARYLFHPTNQVWGMVTRSYNAYLSRADEILGIQVRVFSRQTKYFQHVMDQIVACTQREKLLPEFAAQEEAQVTNTSNPSKLKAVLVTSLNPEYSNNLKKMYWEHPTTTGDIVEVYQPSRERFQQTDKKLHDQKALAEMYLLSLTDKLVTSALSTFGYVAQGLGGLKPWILYTPKKFKSPNPPCGRVISMEPCFLTPPVHGCEAKKGINTAKIVPFVRHCEDLRHYGLKLVDDTKNEL

SEQ ID NO: 31588 - protein, 526 aa, Arabidopsis thaliana
  misc_feature (1)..(526): Ceres Seq. ID no. 13588182
MKTKLMITIFSCLLLWSMLLLLSFSNIFKHQLLGATINVGSKDSVKPRDRLLGGLLTADFDEDSCLSRYQSSLYRKPSPYRTSEYLISKLRNYEMLHKRCGPGTDAYKRATEKLGHDHENVGDSSDGECKYIVWVAVYGLGNRILTLASVFLYALLTERIILVDQRKDISDLFCEPFPGTSWLLPLDFPLMGQIDSFNREYSHCYGTMLKNHTINSTTIPSHLYLHLLHDYRDQDKMFFCQKDQSLVDKVPWLVVKSNLYFIPSLWLNPSFQTELIKLFPQKDTVFYHLARYLFHPTNQVWGMVTRSYNAYLSRADEILGIQVRVFSRQTKYFQHVMDQIVACTQREKLLPEFAAQEEAQVTNTSNPSKLKAVLVTSLNPEYSNNLKKMYWEHPTTTGDIVEVYQPSRERFQQTDKKLHDQKALAEMYLLSLTDKLVTSALSTFGYVAQGLGGLKPWILYTPKKFKSPNPPCGRVISMEPCFLTPPVHGCEAKKGINTAKIVPFVRHCEDLRHYGLKLVDDTKNEL

SEQ ID NO: 31589 - protein, 521 aa, Arabidopsis thaliana
  misc_feature (1)..(521): Ceres Seq. ID no. 13588183
MITIFSCLLLWSMLLLLSFSNIFKHQLLGATINVGSKDSVKPRDRLLGGLLTADFDEDSCLSRYQSSLYRKPSPYRTSEYLISKLRNYEMLHKRCGPGTDAYKRATEKLGHDHENVGDSSDGECKYIVWVAVYGLGNRILTLASVFLYALLTERIILVDQRKDISDLFCEPFPGTSWLLPLDFPLMGQIDSFNREYSHCYGTMLKNHTINSTTIPSHLYLHLLHDYRDQDKMFFCQKDQSLVDKVPWLVVKSNLYFIPSLWLNPSFQTELIKLFPQKDTVFYHLARYLFHPTNQVWGMVTRSYNAYLSRADEILGIQVRVFSRQTKYFQHVMDQIVACTQREKLLPEFAAQEEAQVTNTSNPSKLKAVLVTSLNPEYSNNLKKMYWEHPTTTGDIVEVYQPSRERFQQTDKKLHDQKALAEMYLLSLTDKLVTSALSTFGYVAQGLGGLKPWILYTPKKFKSPNPPCGRVISMEPCFLTPPVHGCEAKKGINTAKIVPFVRHCEDLRHYGLKLVDDTKNEL

SEQ ID NO: 31590 - DNA, 1297 bp, Arabidopsis thaliana
  misc_feature (1)..(1297): Ceres Seq. ID no. 13588192
gacagcaacaagtacaagagagagagagaaagaatcaaaaacatctgtcgcggagagagagagaaagagagaaagagaaaaatgtcgatggctttgcttttgacatcgccggctatgaagcagaagccggcggtgataacttctcctcgccgtggttcttctccttctcgtcgtcttcgagtttcttgtgttaccacaaaccctgctaggaagaaaaacgaaacatgcaatcattttcgacctatcaaagaagtaaataaccaattaacacacacaataccacaggagaagcttgagatcttcaaatcaatggaaaattgggcagaacaaaaactactaccttatctcaaaccggtagaagattcatggcaaccacaagacttcttacctgcgccagagaacgacgacgaattctacgaccgagtaaaagagatcagagaaagaacaaaagagatacctgacgattactttgtagttcttgtgggagatatgatcacagaagaagcacttccaacgtatcaaacgacgttaaacacactagacggtgttaaggatgaaaccggtgggagtttatcgccgtgggctgtgtggattagagcctggacggcggaggaaaaccgtcacggtgacttactcaacaagtatctttatctaactggtcgtgttgatatgcgacatgttgagaagactatacaatatcttattggttctggtatggattcgaaatttgagaacaatccatacaatggattcatctacacatcattccaagagcgagcaacattcatctctcacggcaacacggctaggctagccacaacatacggcgatgttaccctcgcgaagatctgcggcacaatcgctgccgacgagaagcgacacgagacggcgtacacgaagatagtggagaagctattcgagatcgaccctgacggatctgttcaggcgttagcgagtatgatgaagaaacggatcacaatgccggctcatcttatgcacgacggaagagataacgatttgtttgatcattacgccgccgtggcgcagcggattggagtttacacggcggcggattacgctgggatacttgagtttctgttgcggcggtggaaggtggagagtttgggattggggttatcaggagaaggaaggagagcacaggagtacttgtgcaccttgccgcagaggatcaagaggttagaggaaagagctaatgatagggtcaaacttgtgtcaaaaccttctgtttcgtttagctgggtttttggtagagatgtgaaactatagatagatattt

SEQ ID NO: 31591 - protein, 428 aa, Arabidopsis thaliana
  misc_feature (1)..(428): Ceres Seq. ID no. 13588193
DSNKYKRERERIKNICRGEREKERKRKMSMALLLTSPAMKQKPAVITSPRRGSSPSRRLRVSCVTTNPARKKNETCNHFRPIKEVNNQLTHTIPQEKLEIFKSMENWAEQKLLPYLKPVEDSWQPQDFLPAPENDDEFYDRVKEIRERTKEIPDDYFVVLVGDMITEEALPTYQTTLNTLDGVKDETGGSLSPWAVWIRAWTAEENRHGDLLNKYLYLTGRVDMRHVEKTIQYLIGSGMDSKFENNPYNGFIYTSFQERATFISHGNTARLATTYGDVTLAKICGTIAADEKRHETAYTKIVEKLFEIDPDGSVQALASMMKKRITMPAHLMHDGRDNDLFDHYAAVAQRIGVYTAADYAGILEFLLRRWKVESLGLGLSGEGRRAQEYLCTLPQRIKRLEERANDRVKLVSKPSVSFSWVFGRDVKL

SEQ ID NO: 31592 - protein, 401 aa, Arabidopsis thaliana
  misc_feature (1)..(401): Ceres Seq. ID no. 13588194
MSMALLLTSPAMKQKPAVITSPRRGSSPSRRLRVSCVTTNPARKKNETCNHFRPIKEVNNQLTHTIPQEKLEIFKSMENWAEQKLLPYLKPVEDSWQPQDFLPAPENDDEFYDRVKEIRERTKEIPDDYFVVLVGDMITEEALPTYQTTLNTLDGVKDETGGSLSPWAVWIRAWTAEENRHGDLLNKYLYLTGRVDMRHVEKTIQYLIGSGMDSKFENNPYNGFIYTSFQERATFISHGNTARLATTYGDVTLAKICGTIAADEKRHETAYTKIVEKLFEIDPDGSVQALASMMKKRITMPAHLMHDGRDNDLFDHYAAVAQRIGVYTAADYAGILEFLLRRWKVESLGLGLSGEGRRAQEYLCTLPQRIKRLEERANDRVKLVSKPSVSFSWVFGRDVKL

SEQ ID NO: 31593 - protein, 399 aa, Arabidopsis thaliana
  misc_feature (1)..(399): Ceres Seq. ID no. 13588195
MALLLTSPAMKQKPAVITSPRRGSSPSRRLRVSCVTTNPARKKNETCNHFRPIKEVNNQLTHTIPQEKLEIFKSMENWAEQKLLPYLKPVEDSWQPQDFLPAPENDDEFYDRVKEIRERTKEIPDDYFVVLVGDMITEEALPTYQTTLNTLDGVKDETGGSLSPWAVWIRAWTAEENRHGDLLNKYLYLTGRVDMRHVEKTIQYLIGSGMDSKFENNPYNGFIYTSFQERATFISHGNTARLATTYGDVTLAKICGTIAADEKRHETAYTKIVEKLFEIDPDGSVQALASMMKKRITMPAHLMHDGRDNDLFDHYAAVAQRIGVYTAADYAGILEFLLRRWKVESLGLGLSGEGRRAQEYLCTLPQRIKRLEERANDRVKLVSKPSVSFSWVFGRDVKL

SEQ ID NO: 31594 - DNA, 1367 bp, Arabidopsis thaliana
  misc_feature (1)..(1367): Ceres Seq. ID no. 13588196
atatgtatgaagcagctttttgtgaatgaatcttcgaaataggttaaagaaacaaaaatggagaccaaagaattcgactcttacagtgagcgcaaagctttcgacgagacgaaaacaggtgtgaaaggtctcattgatgctcacatcactgagattcctcgaattttctgtctccctcaaggttccttatccgacaagaaaccttttgtttctaccactgattttgcgatccctatcatcgacttcgaaggcctccacgtctcccgtgaagatatcgttgggaagatcaaagacgctgcatcgaattggggattcttccaggtgatcaatcatggtgttcctttaaacgttcttcaagagattcaagatggagttcgtaggtttcatgaggaagctcctgaggttaagaaaacctacttcactcgtgacgccactaaaagatttgtctacaatagtaatttcgatctctatagttcttcttcatgtgttaactggagagactctttcgcttgttacatggctcctgatcctccaaaccctgaggatctccctgtggcttgcagggttgctatgttcgaatactcaaagcatatgatgagattaggtgatttgctctttgagcttctctcagaagctcttggtttgagatctgataagcttaaaagcatggattgcatgaagggtttgcttttgctctgccattattatcctccatgtccacaacctgatctaaccatcggcacaaataatcattcagacaactccttcctcaccattcttctccaggaccaaatcggtggtcttcaaatctttcatcaagactgttgggtcgatgtctctcctattccaggggctctagtcatcaacatgggagatttcttgcagctaataacgaatgacaaagtcataagtgtggagcacagggtgctagcgaacagggcagctacaccgaggatatcagtagctagctttttcagcacaagtatgcgtccgaattcaactgtttatggaccaatcaaagagcttctctctgaagaaaacccttcaaaatacagagtcatcgacttgaaagaatacacagagggatacttcaagaaaggcctcgatggaacatcgtatctgtcgcattacaagatatgaaagaaaaaaacaattgaaagagtaaatcatctcaagtttattgtaagatattggttcgtttcatgcatctattgggttcaggtactagtccaattgtcagatcttgacaaataagtaaaccatttcctttgtaccaaaaacaaaaacaacaaagaaaggtgtgtgtgtgtgtgtgtgtataattttagtgaatgctttaaattgggaataaaggttcaaacttgatc

SEQ ID NO: 31595 - protein, 360 aa, Arabidopsis thaliana
  misc_feature (1)..(360): Ceres Seq. ID no. 13588197
METKEFDSYSERKAFDETKTGVKGLIDAHITEIPRIFCLPQGSLSDKKPFVSTTDFAIPIIDFEGLHVSREDIVGKIKDAASNWGFFQVINHGVPLNVLQEIQDGVRRFHEEAPEVKKTYFTRDATKRFVYNSNFDLYSSSSCVNWRDSFACYMAPDPPNPEDLPVACRVAMFEYSKHMMRLGDLLFELLSEALGLRSDKLKSMDCMKGLLLLCHYYPPCPQPDLTIGTNNHSDNSFLTILLQDQIGGLQIFHQDCWVDVSPIPGALVINMGDFLQLITNDKVISVEHRVLANRAATPRISVASFFSTSMRPNSTVYGPIKELLSEENPSKYRVIDLKEYTEGYFKKGLDGTSYLSHYKI

SEQ ID NO: 31596 - protein, 207 aa, Arabidopsis thaliana
  misc_feature (1)..(207): Ceres Seq. ID no. 13588198
MAPDPPNPEDLPVACRVAMFEYSKHMMRLGDLLFELLSEALGLRSDKLKSMDCMKGLLLLCHYYPPCPQPDLTIGTNNHSDNSFLTILLQDQIGGLQIFHQDCWVDVSPIPGALVINMGDFLQLITNDKVISVEHRVLANRAATPRISVASFFSTSMRPNSTVYGPIKELLSEENPSKYRVIDLKEYTEGYFKKGLDGTSYLSHYKI

SEQ ID NO: 31597 - protein, 189 aa, Arabidopsis thaliana
  misc_feature (1)..(189): Ceres Seq. ID no. 13588199
MFEYSKHMMRLGDLLFELLSEALGLRSDKLKSMDCMKGLLLLCHYYPPCPQPDLTIGTNNHSDNSFLTILLQDQIGGLQIFHQDCWVDVSPIPGALVINMGDFLQLITNDKVISVEHRVLANRAATPRISVASFFSTSMRPNSTVYGPIKELLSEENPSKYRVIDLKEYTEGYFKKGLDGTSYLSHYKI

SEQ ID NO: 31598 - DNA, 1835 bp, Arabidopsis thaliana
  misc_feature (1)..(1835): Ceres Seq. ID no. 13588200
tcacaactcttctttacccacttttcttatatctgctttccaaaacagagaaaccccaagaaaagaaaaagaaaaaagaaaagagaagaaagaagcaggaggagactttttggaatggagagacaaaagagcatggaaaaagggttactcaggaagagcttaagcatacgtgagagaaagttccctaacgaagacgctttcttagaatccggtttatcgaggaagtctccgcgagaggtcaagaaacctcaaaacgacgatggtgaatgtcgtgttaccgcctctgttttcctcagcacctttgttgccgtatcaggctccttctgtaccggttgtggcgttggtttttcatcgggtgcacaagcagggattaccaaagatttatctctctccgttgcagaatactcaatgttcgggtcgatcttgacattaggaggcttgatcggtgcagtattcagcggtaaagtcgctgatgtcttgggaagaaaacggacgatgttgttttgcgaattcttctgtatcacaggctggctttgtgtagcattggctcagaatgcaatgtggctggactgtggaagattgttacttggaatcggcgttggtatatttagctacgtgattccggtgtatatagccgaaattgcacctaaacatgtccgaggatcgtttgtgttcgccaatcagttgatgcaaaattgcggaatttcactcttcttcatcattggcaattttattccatggagactactaacagtagtcggattggtgccatgtgtgttccacgtcttttgtttatttttcatccccgaatctccaagatggctggcgaagttaggtcgtgataaagaatgccgatcttcgttgcaacgccttaggggatctgacgtcgatatttctcgtgaagcaaacacaattagagataccattgacatgacagaaaacggtggtgaaactaagatgtctgaattgtttcagagacgatacgcatatccgttaattatcggagttggtttaatgtttttgcaacaattgtgtgggagctccggtgttacctattatgctagtagcctcttcaacaaaggaggatttccaagtgctattggcacatccgtaatagccacaattatggttccaaaagcaatgctggcaacagtcctagtcgataaaatggggaggagaacgctcctaatggcttcttgttctgcaatgggtttgagtgctttgctcttaagtgtttcttacggtttccagtcgtttggcattcttccagaactcactcccatcttcacttgcatcggcgtcttgggtcacattgtgtcatttgccatgggaatgggaggactaccatggattataatggctgagatatttccgatgaatgtgaaagtgtcagctgggaccttagttactgtaaccaattggttatttggttggattatcacatacactttcaattttatgctagaatggaatgcatcaggaatgttcctcatcttctcaatggtctccgccagttcgatcgtatttatatactttttggtacctgagacaaaaggccgatcacttgaagaaatacaagcactgctcaacaactctgtgcaataatatcatttttctttttctttttgggtaaatgatcatatatataagtcgattgttgttatttggtgtgagtttgaatgtgatccgtgtgcgtatcaaattttggatgggaaatttgaaacagtaaaaatttgtatattcctcgtttgggaaaaatgtatgttttggttagttatatgcaaaaatgttgttgaagaagtttatacataaaaagttaaatacaaaaagatggt

SEQ ID NO: 31599 - protein, 534 aa, Arabidopsis thaliana
  misc_feature (1)..(534): Ceres Seq. ID no. 13588201
SQLFFTHFSYICFPKQRNPKKRKRKKKREERSRRRLFGMERQKSMEKGLLRKSLSIRERKFPNEDAFLESGLSRKSPREVKKPQNDDGECRVTASVFLSTFVAVSGSFCTGCGVGFSSGAQAGITKDLSLSVAEYSMFGSILTLGGLIGAVFSGKVADVLGRKRTMLFCEFFCITGWLCVALAQNAMWLDCGRLLLGIGVGIFSYVIPVYIAEIAPKHVRGSFVFANQLMQNCGISLFFIIGNFIPWRLLTVVGLVPCVFHVFCLFFIPESPRWLAKLGRDKECRSSLQRLRGSDVDISREANTIRDTIDMTENGGETKMSELFQRRYAYPLIIGVGLMFLQQLCGSSGVTYYASSLFNKGGFPSAIGTSVIATIMVPKAMLATVLVDKMGRRTLLMASCSAMGLSALLLSVSYGFQSFGILPELTPIFTCIGVLGHIVSFAMGMGGLPWIIMAEIFPMNVKVSAGTLVTVTNWLFGWIITYTFNFMLEWNASGMFLIFSMVSASSIVFIYFLVPETKGRSLEEIQALLNNSVQ

SEQ ID NO: 31600 - protein, 496 aa, Arabidopsis thaliana
  misc_feature (1)..(496): Ceres Seq. ID no. 13588202
MERQKSMEKGLLRKSLSIRERKFPNEDAFLESGLSRKSPREVKKPQNDDGECRVTASVFLSTFVAVSGSFCTGCGVGFSSGAQAGITKDLSLSVAEYSMFGSILTLGGLIGAVFSGKVADVLGRKRTMLFCEFFCITGWLCVALAQNAMWLDCGRLLLGIGVGIFSYVIPVYIAEIAPKHVRGSFVFANQLMQNCGISLFFIIGNFIPWRLLTVVGLVPCVFHVFCLFFIPESPRWLAKLGRDKECRSSLQRLRGSDVDISREANTIRDTIDMTENGGETKMSELFQRRYAYPLIIGVGLMFLQQLCGSSGVTYYASSLFNKGGFPSAIGTSVIATIMVPKAMLATVLVDKMGRRTLLMASCSAMGLSALLLSVSYGFQSFGILPELTPIFTCIGVLGHIVSFAMGMGGLPWIIMAEIFPMNVKVSAGTLVTVTNWLFGWIITYTFNFMLEWNASGMFLIFSMVSASSIVFIYFLVPETKGRSLEEIQALLNNSVQ

SEQ ID NO: 31601 - protein, 490 aa, Arabidopsis thaliana
  misc_feature (1)..(490): Ceres Seq. ID no. 13588203
MEKGLLRKSLSIRERKFPNEDAFLESGLSRKSPREVKKPQNDDGECRVTASVFLSTFVAVSGSFCTGCGVGFSSGAQAGITKDLSLSVAEYSMFGSILTLGGLIGAVFSGKVADVLGRKRTMLFCEFFCITGWLCVALAQNAMWLDCGRLLLGIGVGIFSYVIPVYIAEIAPKHVRGSFVFANQLMQNCGISLFFIIGNFIPWRLLTVVGLVPCVFHVFCLFFIPESPRWLAKLGRDKECRSSLQRLRGSDVDISREANTIRDTIDMTENGGETKMSELFQRRYAYPLIIGVGLMFLQQLCGSSGVTYYASSLFNKGGFPSAIGTSVIATIMVPKAMLATVLVDKMGRRTLLMASCSAMGLSALLLSVSYGFQSFGILPELTPIFTCIGVLGHIVSFAMGMGGLPWIIMAEIFPMNVKVSAGTLVTVTNWLFGWIITYTFNFMLEWNASGMFLIFSMVSASSIVFIYFLVPETKGRSLEEIQALLNNSVQ

SEQ ID NO: 31602 - DNA, 1681 bp, Arabidopsis thaliana
  misc_feature (1)..(1681): Ceres Seq. ID no. 13588234
atatcattcatgggcccctacgcattactcggtaccaatctcgctctctctctctaagtcttgaaactctatcaagaatctcaagccaccattttttcttcatcttcataaagagaaagagagagatcctcttgtttggcaagaacccaatttgagttctaagtcctgatttgctttgctcttttctttccttgatttcattctatataaagtcaacggaaagatatacatatatagttttcttccgattctagggttttcatatttcctctaaattttcatggtcaaagaagaaaatctaagaaacaatcgaaccagcaagagaaagaagacttcaatatcaacatctctctctctcttatattataagatctcgagttgagtcatcatcatcgtcaatggctttgaaaaacatccgcaacaattcaccaattgaagaacaagagaaaggtttaaacttcatcaagattcactaagacccactaagagccaactcaagactaaacggagcaaggttttgccaaaaaccaaaaaaaaaaaaaaaaaagattcaagaaccatctcgtaaatcaagatttctccaaggaaaatcagataggtcataatggatctatccctggctccgacaacaacaacaagttccgaccaagaacaagacagagaccaagaattaacctccaacatcggagcaagcagcagctccggtcccagcggaaacaacaacaaccttccgatgatgatgattccacctccggagaaagaacacatgttcgacaaagtggtaacaccaagcgacgtcggaaaactcaacagactcgtgatccctaaacaacacgctgagaggtatttccctctagactcctcaaacaaccaaaacggcacgcttttgaacttccaagacagaaacggcaagatgtggagattccgttactcgtattggaactctagccagagctacgttatgaccaaaggatggagccgtttcgtcaaagagaaaaagctcgatgcaggagacattgtctctttccaacgaggcatcggagatgagtcagaaagatccaaactttacatagattggaggcatagacccgacatgagcctcgttcaagcacatcagtttggtaattttggtttcaatttcaatttcccgaccacttctcaatattccaacagatttcatccattgccagaatataactccgtcccgattcaccggggcttaaacatcggaaatcaccaacgttcctattataacacccagcgtcaagagttcgtagggtatggttatgggaatttagctggaaggtgttactacacgggatcaccgttggatcataggaacattgttggatcagagccgttggttatagactcagtccctgtggttcccgggagattaactccggtgatgttaccgccgcttcctccgcctccttctacggcgggaaagagactaaggctctttggggtgaatatggaatgtggcaatgactataatcaacaagaagagtcatggttggtgccacgtggcgaaattggtgcatcttcttcttcttcttcagctctacgactaaatttatcgactgatcatgatgatgataatgatgatggtgatgatggcgatgatgatcaatttgctaagaaagggaagtcttcactttctctcaatttcaatccatga

SEQ ID NO: 31603 - protein, 358 aa, Arabidopsis thaliana
  misc_feature (1)..(358): Ceres Seq. ID no. 13588235
MDLSLAPTTTTSSDQEQDRDQELTSNIGASSSSGPSGNNNNLPMMMIPPPEKEHMFDKVVTPSDVGKLNRLVIPKQHAERYFPLDSSNNQNGTLLNFQDRNGKMWRFRYSYWNSSQSYVMTKGWSRFVKEKKLDAGDIVSFQRGIGDESERSKLYIDWRHRPDMSLVQAHQFGNFGFNFNFPTTSQYSNRFHPLPEYNSVPIHRGLNIGNHQRSYYNTQRQEFVGYGYGNLAGRCYYTGSPLDHRNIVGSEPLVIDSVPVVPGRLTPVMLPPLPPPPSTAGKRLRLFGVNMECGNDYNQQEESWLVPRGEIGASSSSSSALRLNLSTDHDDDNDDGDDGDDDQFAKKGKSSLSLNFNP

SEQ ID NO: 31604 - protein, 315 aa, Arabidopsis thaliana
  misc_feature (1)..(315): Ceres Seq. ID no. 13588236
MMMIPPPEKEHMFDKVVTPSDVGKLNRLVIPKQHAERYFPLDSSNNQNGTLLNFQDRNGKMWRFRYSYWNSSQSYVMTKGWSRFVKEKKLDAGDIVSFQRGIGDESERSKLYIDWRHRPDMSLVQAHQFGNFGFNFNFPTTSQYSNRFHPLPEYNSVPIHRGLNIGNHQRSYYNTQRQEFVGYGYGNLAGRCYYTGSPLDHRNIVGSEPLVIDSVPVVPGRLTPVMLPPLPPPPSTAGKRLRLFGVNMECGNDYNQQEESWLVPRGEIGASSSSSSALRLNLSTDHDDDNDDGDDGDDDQFAKKGKSSLSLNFNP

SEQ ID NO: 31605 - protein, 314 aa, Arabidopsis thaliana
  misc_feature (1)..(314): Ceres Seq. ID no. 13588237
MMIPPPEKEHMFDKVVTPSDVGKLNRLVIPKQHAERYFPLDSSNNQNGTLLNFQDRNGKMWRFRYSYWNSSQSYVMTKGWSRFVKEKKLDAGDIVSFQRGIGDESERSKLYIDWRHRPDMSLVQAHQFGNFGFNFNFPTTSQYSNRFHPLPEYNSVPIHRGLNIGNHQRSYYNTQRQEFVGYGYGNLAGRCYYTGSPLDHRNIVGSEPLVIDSVPVVPGRLTPVMLPPLPPPPSTAGKRLRLFGVNMECGNDYNQQEESWLVPRGEIGASSSSSSALRLNLSTDHDDDNDDGDDGDDDQFAKKGKSSLSLNFNP

SEQ ID NO: 31606 - DNA, 3302 bp, Arabidopsis thaliana
  misc_feature (1)..(3302): Ceres Seq. ID no. 13588242
atgccgctcagactcgagatcaagagaaaattagcgcaaaggtctgagagagttaaatctgtggatcttcatcctacagaaccatggattcttgcaagtttgtattctggaaccttgtgtatttggaactaccagacgcaggtgatggcaaaatcctttgaggtgactgaattaccagttcggtcagccaagtttgtagcacgaaagcaatgggttgtcgcaggagctgatgatatgtatatccgtgtatacaattacaacaccatggacaaggttaaagtgtttgaggctcattcagactacattaggtgtgtggctgttcatccaacccttccatatgtgctgtcatcttctgatgatatgctcataaagctttgggactgggaaaagggttgggcttgcactcagatattcgagggacactcacactatgtgatgcaagtcacatttaatccaaaagacaccaacacttttgccagtgcatcccttgatcgtaccataaagatttggaatcttggttccccagacccaaattttacattggatgcccatcagaaaggagtaaattgtgtagattatttcaccggtggtgataagccctatttaattaccggctctgatgatcacactgctaaggtctgggactaccaaacaaaaagttgtgtacagaccctggaggggcacacacacaatgtatctgcagtatgtttccatccagagcttccaattataatcacaggttctgaagatggcaccgttcgcatttggcatgcaaccacatacaggctagagaacacattgaattatggccttgagagagtctgggcaattggttacattaaaagttcacgccgggttgtgatcggatatgatgaaggaaccatcatggttaaacttggacgagaaattcctgtcgctagcatggacaataccggaaaaatcatatgggctaagcataatgaaattcaaactgcaaacatcaaaagtattggtgcagattacgaggttactgatggagaaaggttgcccttgagtgttaaagagttggggacctgtgatctttatccacaaagcttgaagcacaaccctaatgggaggtttgtcgtagtctgtggtgacggagaatatataatctacacggctttggcttggagaaataggtcatttggttctggactggaatttgtttggtcatccgagggggagtgtgcggttagagaaagctcatcaaagattaaaatatttagcaaaaatttccaggaaaagaggagtatccgccctactttttcagctgagaagatctttggaggaaccttgttagctatgtgttcaagtgatttcatctgcttttatgattgggctgaatgtaggctgattcaacgtattgacgtcactgtaaagaatctatattgggctgacagtggtgatttagtagccattgctagtgacacatcattctacatcttgaaattcaaccgcgacttagttacctcacattttgatagcggaagacctactgaggaagaaggtgttgaggatgcttttgaggttctccatgaaaatgatgaacgtgttaggacaggtatatgggttggtgactgtttcatttacaacaactcttcctggaagcttaactactgtgttggaggcgaggtaaccacaatgtatcatttggaccgcccaatgtatttgttgggatatcttgcaagtcaaagtcgggttttcttggtagacaaagaattcaatgttatagggtacaccttgttgctaagcctgattgagtacaagactcttgtgatgcggggtgatttagacaaagccagtgaaatcttacctacaattcctaaagatcagcataacagtgttgctcatttcttggagtcacggggaatgattgaagatgctctggaaattgcaacagatcctgactacagatttgagttggccatacaactgggtagacttgaaattgcacaggaaatcgctgtggaagtacagagcgaatctaagtggaaacaattaggagagttagctatgtcctccggaaagctgcaaatggctgaggaatgcatgaagtatgcgatggatttgagtggtttgttacttctttattcttctctgggagatgctgaaggtgtaacaaaacttgcaacacttgctaaagaacaagggaagaacaatgtcgcctttctttgcctattcatgctgggtaaactggaagattgtttgcagttattggtggagagtaaccggataccagaagctgctctgatggcacgatcatatcttccgagcaaagtttctgagatagtagctctttggaggaaagatctcagcaaggttaattcaaaagcagcagaatctttggctgatcctgaggagtactcaaatctttttgaagattggcaagttgctctttctgtggaagctaaagctgtagagacaaggggagtttacacaggtgcaaaagattatcctagccatgctgataaatcttccatgaccctcgtggaagccttccgaaacttgcaagttgaggaagaggaatcacttgaaaatggagatatggatcacgaggaggtagtagcagaagaaaatggaaatgaacaaaggaatgaggatgatgtagcggagcatgtagaggagcatcatgaagagaaagaagcagaagaagaagagggaattgttgatggagactctacggatggagctgtacttgttaatggaagtgaggctgacgaagagtggggtacgaataatgaaggaaacccatcagcctaatagcaagtcggtcaaggccaatgttgaaaagtctgaaaattttgtctctgtgcttacaccgcgtcagtagagtttacagtttatgggaatggtgaaagttccagcaacaatggagagaggtgagagaactttcattcttttactgaggattgaaaggtcaaatccgagcagcctggaaccacattttgaaaccattttgtaataaaagtttgaatttcttaagaaaatgaaaatcgagtaggactcagttctttgctggagagactggaagatttagatgaaagagaggctgatgagtttttaagcaagtgtggtcgttcctttttgtcttttgcactcacagggaggtttattattattatcatatggttttttttttttttttttcctacaaatatctacttagatttcatcagattgttttttttttttccttttcttttgtctggcctgtaacatgattttttcacttttcatcgttgcatatataattcttttgaagacttgatctctaaaaatat

SEQ ID NO: 31607 - protein, 926 aa, Arabidopsis thaliana
  misc_feature (1)..(926): Ceres Seq. ID no. 13588243
MPLRLEIKRKLAQRSERVKSVDLHPTEPWILASLYSGTLCIWNYQTQVMAKSFEVTELPVRSAKFVARKQWVVAGADDMYIRVYNYNTMDKVKVFEAHSDYIRCVAVHPTLPYVLSSSDDMLIKLWDWEKGWACTQIFEGHSHYVMQVTFNPKDTNTFASASLDRTIKIWNLGSPDPNFTLDAHQKGVNCVDYFTGGDKPYLITGSDDHTAKVWDYQTKSCVQTLEGHTHNVSAVCFHPELPIIITGSEDGTVRIWHATTYRLENTLNYGLERVWAIGYIKSSRRVVIGYDEGTIMVKLGREIPVASMDNTGKIIWAKHNEIQTANIKSIGADYEVTDGERLPLSVKELGTCDLYPQSLKHNPNGRFVVVCGDGEYIIYTALAWRNRSFGSGLEFVWSSEGECAVRESSSKIKIFSKNFQEKRSIRPTFSAEKIFGGTLLAMCSSDFICFYDWAECRLIQRIDVTVKNLYWADSGDLVAIASDTSFYILKFNRDLVTSHFDSGRPTEEEGVEDAFEVLHENDERVRTGIWVGDCFIYNNSSWKLNYCVGGEVTTMYHLDRPMYLLGYLASQSRVFLVDKEFNVIGYTLLLSLIEYKTLVMRGDLDKASEILPTIPKDQHNSVAHFLESRGMIEDALEIATDPDYRFELAIQLGRLEIAQEIAVEVQSESKWKQLGELAMSSGKLQMAEECMKYAMDLSGLLLLYSSLGDAEGVTKLATLAKEQGKNNVAFLCLFMLGKLEDCLQLLVESNRIPEAALMARSYLPSKVSEIVALWRKDLSKVNSKAAESLADPEEYSNLFEDWQVALSVEAKAVETRGVYTGAKDYPSHADKSSMTLVEAFRNLQVEEEESLENGDMDHEEVVAEENGNEQRNEDDVAEHVEEHHEEKEAEEEEGIVDGDSTDGAVLVNGSEADEEWGTNNEGNPSA

SEQ ID NO: 31608 - protein, 878 aa, Arabidopsis thaliana
  misc_feature (1)..(878): Ceres Seq. ID no. 13588244
MAKSFEVTELPVRSAKFVARKQWVVAGADDMYIRVYNYNTMDKVKVFEAHSDYIRCVAVHPTLPYVLSSSDDMLIKLWDWEKGWACTQIFEGHSHYVMQVTFNPKDTNTFASASLDRTIKIWNLGSPDPNFTLDAHQKGVNCVDYFTGGDKPYLITGSDDHTAKVWDYQTKSCVQTLEGHTHNVSAVCFHPELPIIITGSEDGTVRIWHATTYRLENTLNYGLERVWAIGYIKSSRRVVIGYDEGTIMVKLGREIPVASMDNTGKIIWAKHNEIQTANIKSIGADYEVTDGERLPLSVKELGTCDLYPQSLKHNPNGRFVVVCGDGEYIIYTALAWRNRSFGSGLEFVWSSEGECAVRESSSKIKIFSKNFQEKRSIRPTFSAEKIFGGTLLAMCSSDFICFYDWAECRLIQRIDVTVKNLYWADSGDLVAIASDTSFYILKFNRDLVTSHFDSGRPTEEEGVEDAFEVLHENDERVRTGIWVGDCFIYNNSSWKLNYCVGGEVTTMYHLDRPMYLLGYLASQSRVFLVDKEFNVIGYTLLLSLIEYKTLVMRGDLDKASEILPTIPKDQHNSVAHFLESRGMIEDALEIATDPDYRFELAIQLGRLEIAQEIAVEVQSESKWKQLGELAMSSGKLQMAEECMKYAMDLSGLLLLYSSLGDAEGVTKLATLAKEQGKNNVAFLCLFMLGKLEDCLQLLVESNRIPEAALMARSYLPSKVSEIVALWRKDLSKVNSKAAESLADPEEYSNLFEDWQVALSVEAKAVETRGVYTGAKDYPSHADKSSMTLVEAFRNLQVEEEESLENGDMDHEEVVAEENGNEQRNEDDVAEHVEEHHEEKEAEEEEGIVDGDSTDGAVLVNGSEADEEWGTNNEGNPSA

SEQ ID NO: 31609 - protein, 848 aa, Arabidopsis thaliana
  misc_feature (1)..(848): Ceres Seq. ID no. 13588245
MYIRVYNYNTMDKVKVFEAHSDYIRCVAVHPTLPYVLSSSDDMLIKLWDWEKGWACTQIFEGHSHYVMQVTFNPKDTNTFASASLDRTIKIWNLGSPDPNFTLDAHQKGVNCVDYFTGGDKPYLITGSDDHTAKVWDYQTKSCVQTLEGHTHNVSAVCFHPELPIIITGSEDGTVRIWHATTYRLENTLNYGLERVWAIGYIKSSRRVVIGYDEGTIMVKLGREIPVASMDNTGKIIWAKHNEIQTANIKSIGADYEVTDGERLPLSVKELGTCDLYPQSLKHNPNGRFVVVCGDGEYIIYTALAWRNRSFGSGLEFVWSSEGECAVRESSSKIKIFSKNFQEKRSIRPTFSAEKIFGGTLLAMCSSDFICFYDWAECRLIQRIDVTVKNLYWADSGDLVAIASDTSFYILKFNRDLVTSHFDSGRPTEEEGVEDAFEVLHENDERVRTGIWVGDCFIYNNSSWKLNYCVGGEVTTMYHLDRPMYLLGYLASQSRVFLVDKEFNVIGYTLLLSLIEYKTLVMRGDLDKASEILPTIPKDQHNSVAHFLESRGMIEDALEIATDPDYRFELAIQLGRLEIAQEIAVEVQSESKWKQLGELAMSSGKLQMAEECMKYAMDLSGLLLLYSSLGDAEGVTKLATLAKEQGKNNVAFLCLFMLGKLEDCLQLLVESNRIPEAALMARSYLPSKVSEIVALWRKDLSKVNSKAAESLADPEEYSNLFEDWQVALSVEAKAVETRGVYTGAKDYPSHADKSSMTLVEAFRNLQVEEEESLENGDMDHEEVVAEENGNEQRNEDDVAEHVEEHHEEKEAEEEEGIVDGDSTDGAVLVNGSEADEEWGTNNEGNPSA

SEQ ID NO: 31610 - DNA, 1237 bp, Arabidopsis thaliana
  misc_feature (1)..(1237): Ceres Seq. ID no. 13588261
aacataaattaagttttttttgtccttttctgcctttacctttccttctactcccgaaaaagcactgactttgctctgtttccttcgttcacacagagaaagagagaaatcttctgagcgaaattctgacaaaagagatgatggaatgggataatcagctacaacccaataaccatcactcttctaatcttcaagggatcgacgttaatggcggctccggcgccggaggaggaatgtacgtgaaggtgatgaccgatgagcagtatgaaactctcaggaaacagattgctatttacggcaccatttgtgagcgtcttgttgagatgcataaaactctcactgctcaacaagatcttgcaggagggagaatgggaggactatatgcagacccaatgatgtcatctttaggtcataagatgacagctagacagaggtggactcctacgccagtccagcttcagattctggaacgtatattcgatcaaggcacgggaacaccgagcaagcagaagatcaaagacataacagaagagctgagccaacacggccagattgctgaacaaaatgtctataactggttccagaaccgacgtgctcgatccaagaggaagcagcatggtggaggttcttctggaaataataatggtgagtctgaggtagagactgaagttgaagcattgaatgagaagagagtagtgaggccagagagtcttcttggtcttccagatggaaatagcaacaataatgggttagggacaacaacagcaacaactactgctcctaggcctgaagatctttgctttcagagccctgagattagctcagaccttcacttgctagatgttctatcaaacccaagggatgagcatcttgttggaaagatgggactggcggaaagttacaacctttatgatcatgttgaagattatggcatgtcaggctgattgaatacaagctgaggaaacttctaattatcagagagatcaatgaaatggatttggtagtcagtcataagcagtattagacttttgtttttcttaaattgtttctttcagggcttattaaagaaacaagtagtttatcttattaatcattttcagagaaacatttacatggattgttgaatcgtcttgtgatgcttgctttgataatttctgcattcagaacgatttttacatccttaaatgaattatactgtaagaaataaaaaaattccaagagaaaaacatttcaattc

SEQ ID NO: 31611 - protein, 268 aa, Arabidopsis thaliana
  misc_feature (1)..(268): Ceres Seq. ID no. 13588262
MMEWDNQLQPNNHHSSNLQGIDVNGGSGAGGGMYVKVMTDEQYETLRKQIAIYGTICERLVEMHKTLTAQQDLAGGRMGGLYADPMMSSLGHKMTARQRWTPTPVQLQILERIFDQGTGTPSKQKIKDITEELSQHGQIAEQNVYNWFQNRRARSKRKQHGGGSSGNNNGESEVETEVEALNEKRVVRPESLLGLPDGNSNNNGLGTTTATTTAPRPEDLCFQSPEISSDLHLLDVLSNPRDEHLVGKMGLAESYNLYDHVEDYGMSG

SEQ ID NO: 31612 - protein, 267 aa, Arabidopsis thaliana
  misc_feature (1)..(267): Ceres Seq. ID no. 13588263
MEWDNQLQPNNHHSSNLQGIDVNGGSGAGGGMYVKVMTDEQYETLRKQIAIYGTICERLVEMHKTLTAQQDLAGGRMGGLYADPMMSSLGHKMTARQRWTPTPVQLQILERIFDQGTGTPSKQKIKDITEELSQHGQIAEQNVYNWFQNRRARSKRKQHGGGSSGNNNGESEVETEVEALNEKRVVRPESLLGLPDGNSNNNGLGTTTATTTAPRPEDLCFQSPEISSDLHLLDVLSNPRDEHLVGKMGLAESYNLYDHVEDYGMSG

SEQ ID NO: 31613 - protein, 236 aa, Arabidopsis thaliana
  misc_feature (1)..(236): Ceres Seq. ID no. 13588264
MYVKVMTDEQYETLRKQIAIYGTICERLVEMHKTLTAQQDLAGGRMGGLYADPMMSSLGHKMTARQRWTPTPVQLQILERIFDQGTGTPSKQKIKDITEELSQHGQIAEQNVYNWFQNRRARSKRKQHGGGSSGNNNGESEVETEVEALNEKRVVRPESLLGLPDGNSNNNGLGTTTATTTAPRPEDLCFQSPEISSDLHLLDVLSNPRDEHLVGKMGLAESYNLYDHVEDYGMSG

SEQ ID NO: 31614 - DNA, 1565 bp, Arabidopsis thaliana
  misc_feature (1)..(1565): Ceres Seq. ID no. 13588273
tcgattggccaaatcggccctcgagagacttgtgagagatccccaaaaaaatggcatggcttgctagatccattgcgaattctctgaagatcgatgaggaagaatatgatcaaaaggaaacgattaagaccaattcgattgaaaattccggctcagatcaaccgtcttcgccatcggtgttgcaaacacagtctccacgaggcgtgaaggaagacatctctgaactcaccaagaccttaagaagtcagctacggggcgttgcttctttcctcgcgccacctccttcttcttccgatacggcggatcatgtggatgaggagactcggaagtcatcggatctcgcggaaggtgatgaggatctgattgctggaatcaggaacgatttcgttgagatcggaggtagatttaagactgggatctcgaaactctctggaaacttaccggtatcgaagtttacaaatatggcttcgaatttcttgcaattgggatcggaaggtgtggattcgaagaaccgtgatgttgcgattggaaatgcaattggtgtgacggaggaagtagttttgtttgctagagatcttgctctgcatcctgagacttggcttgattttccttttcctgacgaggatgataactttgatgactttgaaatgactgatgcccaatatgagcatgcgttggctgtggagaatcttgcatcgagtctggctgctttgaggattgagctttgtcctgcgtacatgagcgagtattgcttctggaggatttactttgtacttgtgcatcctatattcagcaaacatgatgccttgactctctcaactcctcaggtacttgaatcaagagcactattatctcacgagctgttgcgtaagagaaacaaagatacagtagtggtgccagagagtagtgatagaggagctgatagtgaaaatgtggaacctctttttcaacctactaatccttcacccaaatcagaaccagaacctgtgaaaacgatcactgtcgaaacaatacattcggctgagagatctgagtttgagacagagaagcacacagtcgagaccaaggaggtacaagttgttgataagcctgtcatcgaagaaagaccagcaccagcgtaccatgacaagccggtgcagagcctagtcactggttcttcacctagagttattgatgttcaagtggatgatgatgctgatgattggttgaaggatgaagataatgcaggaactgttagtgccaccaccaaccatcttgtgcaggatgttgatgaagatgtgtcgttcagtgatcttgaagaagacgacgatgatgtgcctgtaagttacaagaaataattcctgattccaaaagacctcaccattactccaaaaggctggctctggaagaataatgtcccacggctggtcaggtaagcgagacgaagatagaaatcaaacgatgggcttgaatgttgatgacgaacatggatgctatatttgtgatcctatacgttaattaaatttatgtttgtgaataccttttgtaaacgcttgccttttcaaaagatgcatggtttgttttgt

SEQ ID NO: 31615 - protein, 428 aa, Arabidopsis thaliana
  misc_feature (1)..(428): Ceres Seq. ID no. 13588274
MAWLARSIANSLKIDEEEYDQKETIKTNSIENSGSDQPSSPSVLQTQSPRGVKEDISELTKTLRSQLRGVASFLAPPPSSSDTADHVDEETRKSSDLAEGDEDLIAGIRNDFVEIGGRFKTGISKLSGNLPVSKFTNMASNFLQLGSEGVDSKNRDVAIGNAIGVTEEVVLFARDLALHPETWLDFPFPDEDDNFDDFEMTDAQYEHALAVENLASSLAALRIELCPAYMSEYCFWRIYFVLVHPIFSKHDALTLSTPQVLESRALLSHELLRKRNKDTVVVPESSDRGADSENVEPLFQPTNPSPKSEPEPVKTITVETIHSAERSEFETEKHTVETKEVQVVDKPVIEERPAPAYHDKPVQSLVTGSSPRVIDVQVDDDADDWLKDEDNAGTVSATTNHLVQDVDEDVSFSDLEEDDDDVPVSYKK

SEQ ID NO: 31616 - protein, 291 aa, Arabidopsis thaliana
  misc_feature (1)..(291): Ceres Seq. ID no. 13588275
MASNFLQLGSEGVDSKNRDVAIGNAIGVTEEVVLFARDLALHPETWLDFPFPDEDDNFDDFEMTDAQYEHALAVENLASSLAALRIELCPAYMSEYCFWRIYFVLVHPIFSKHDALTLSTPQVLESRALLSHELLRKRNKDTVVVPESSDRGADSENVEPLFQPTNPSPKSEPEPVKTITVETIHSAERSEFETEKHTVETKEVQVVDKPVIEERPAPAYHDKPVQSLVTGSSPRVIDVQVDDDADDWLKDEDNAGTVSATTNHLVQDVDEDVSFSDLEEDDDDVPVSYKK

SEQ ID NO: 31617 - protein, 229 aa, Arabidopsis thaliana
  misc_feature (1)..(229): Ceres Seq. ID no. 13588276
MTDAQYEHALAVENLASSLAALRIELCPAYMSEYCFWRIYFVLVHPIFSKHDALTLSTPQVLESRALLSHELLRKRNKDTVVVPESSDRGADSENVEPLFQPTNPSPKSEPEPVKTITVETIHSAERSEFETEKHTVETKEVQVVDKPVIEERPAPAYHDKPVQSLVTGSSPRVIDVQVDDDADDWLKDEDNAGTVSATTNHLVQDVDEDVSFSDLEEDDDDVPVSYKK

SEQ ID NO: 31618 - DNA, 1532 bp, Arabidopsis thaliana
  misc_feature (1)..(1532): Ceres Seq. ID no. 13588277
gagtcctcacttctctcacccacaaagtcacagtaaccagaaacacgttccacatcctatgaatccaatcaaacctcagccactcggagtccgccacgtggtggccatgccttggccaggaagaggccacatcaacccaatgttaaacctctgcaaaagcctcgtccggcgagacccaaacctcaccgtcacattcgtcgtcaccgaagaatggctcgggttcatcgggtccgacccgaaacctaaccggatccatttcgccactctccccaacatcattccctccgagctcgtccgagccaacgacttcatcgccttcatcgacgccgtcctcaccagattagaagagccgttcgaacagctacttgaccgtctaaactctcctcccaccgcaatcatcgccgatacttacatcatttgggcagtacgtgtaggcacaaaaaggaatattccggtggcttctttctggactacgtcagccacgattctctccctcttcattaactccgatcttctcgcaagtcacggccattttccgatcgaaccatcagaatcaaaactagacgagattgttgattacatccccggtttatctccgacaagactcagtgacttacagatcttacacggctatagtcatcaagtcttcaatatattcaaaaagtctttcggtgagctttataaagctaagtatcttctcttcccttctgcttatgagctcgaaccaaaagccattgactttttcacttccaagtttgatttcccggtttactccactggtccgttaatacccttggaagaactatccgttggaaatgagaatagagaacttgattactttaagtggcttgatgagcaacctgaaagctctgttctttacatatctcaagggagttttctttcagtctccgaagctcagatggaggagattgttgtaggagttagagaggctggagttaagttcttttgggtggctcgtgggggtgagttaaagcttaaggaggctcttgaaggtagcttgggtgttgtggtgagctggtgtgatcagctacgtgttttgtgtcatgcggctataggcgggttttggacgcattgcgggtataactcgacattggaagggatatgttcgggagtaccgttgcttacatttcctgttttttgggatcagtttctgaatgctaagatgattgttgaggagtggagagttggaatggggatcgagaggaagaagcagatggagttgttgatagtgagtgatgagatcaaggaattggtaaaaaggtttatggatggagagagtgaagaagggaaagagatgagaagaaggacttgtgatctcagtgagatatgtcgtggagcggttgcgaaaggtggttcttctgatgctaacatcgatgctttcattaaagatattactaagatcgtgtgagttctattgttgttaatgattcaagtctatattagtatttgtataagtttgttaaagattcaaactttgtagagatttaagattgtttgtaaaactgttattt

SEQ ID NO: 31619 - protein, 475 aa, Arabidopsis thaliana
  misc_feature (1)..(475): Ceres Seq. ID no. 13588278
SPHFSHPQSHSNQKHVPHPMNPIKPQPLGVRHVVAMPWPGRGHINPMLNLCKSLVRRDPNLTVTFVVTEEWLGFIGSDPKPNRIHFATLPNIIPSELVRANDFIAFIDAVLTRLEEPFEQLLDRLNSPPTAIIADTYIIWAVRVGTKRNIPVASFWTTSATILSLFINSDLLASHGHFPIEPSESKLDEIVDYIPGLSPTRLSDLQILHGYSHQVFNIFKKSFGELYKAKYLLFPSAYELEPKAIDFFTSKFDFPVYSTGPLIPLEELSVGNENRELDYFKWLDEQPESSVLYISQGSFLSVSEAQMEEIVVGVREAGVKFFWVARGGELKLKEALEGSLGVVVSWCDQLRVLCHAAIGGFWTHCGYNSTLEGICSGVPLLTFPVFWDQFLNAKMIVEEWRVGMGIERKKQMELLIVSDEIKELVKRFMDGESEEGKEMRRRTCDLSEICRGAVAKGGSSDANIDAFIKDITKIV

SEQ ID NO: 31620 - protein, 456 aa, Arabidopsis thaliana
  misc_feature (1)..(456): Ceres Seq. ID no. 13588279
MNPIKPQPLGVRHVVAMPWPGRGHINPMLNLCKSLVRRDPNLTVTFVVTEEWLGFIGSDPKPNRIHFATLPNIIPSELVRANDFIAFIDAVLTRLEEPFEQLLDRLNSPPTAIIADTYIIWAVRVGTKRNIPVASFWTTSATILSLFINSDLLASHGHFPIEPSESKLDEIVDYIPGLSPTRLSDLQILHGYSHQVFNIFKKSFGELYKAKYLLFPSAYELEPKAIDFFTSKFDFPVYSTGPLIPLEELSVGNENRELDYFKWLDEQPESSVLYISQGSFLSVSEAQMEEIVVGVREAGVKFFWVARGGELKLKEALEGSLGVVVSWCDQLRVLCHAAIGGFWTHCGYNSTLEGICSGVPLLTFPVFWDQFLNAKMIVEEWRVGMGIERKKQMELLIVSDEIKELVKRFMDGESEEGKEMRRRTCDLSEICRGAVAKGGSSDANIDAFIKDITKIV

SEQ ID NO: 31621 - protein, 440 aa, Arabidopsis thaliana
  misc_feature (1)..(440): Ceres Seq. ID no. 13588280
MPWPGRGHINPMLNLCKSLVRRDPNLTVTFVVTEEWLGFIGSDPKPNRIHFATLPNIIPSELVRANDFIAFIDAVLTRLEEPFEQLLDRLNSPPTAIIADTYIIWAVRVGTKRNIPVASFWTTSATILSLFINSDLLASHGHFPIEPSESKLDEIVDYIPGLSPTRLSDLQILHGYSHQVFNIFKKSFGELYKAKYLLFPSAYELEPKAIDFFTSKFDFPVYSTGPLIPLEELSVGNENRELDYFKWLDEQPESSVLYISQGSFLSVSEAQMEEIVVGVREAGVKFFWVARGGELKLKEALEGSLGVVVSWCDQLRVLCHAAIGGFWTHCGYNSTLEGICSGVPLLTFPVFWDQFLNAKMIVEEWRVGMGIERKKQMELLIVSDEIKELVKRFMDGESEEGKEMRRRTCDLSEICRGAVAKGGSSDANIDAFIKDITKIV

SEQ ID NO: 31622 - DNA, 1177 bp, Arabidopsis thaliana
  misc_feature (1)..(1177): Ceres Seq. ID no. 13588287
gctgttactgctaccgacaagcttagctttttttcctttgtccttaattcagaaaacagtttcttctctctctaccagtatctatctttattctcctttaacttggataaaacactcagcttcctcgaagcctctcatcttcatcatcagcagcttctctatatctctcctctctttcaaggataataaccaaaagcttttctttttatcttctcctgcaattcttgaagaaatggatgagtttgttaacctcaaggaaacagagctgaggctgggattaccgggaacagataatgtatgtgaagcaaaagagagagtttcttgctgtaataacaacaataagagagtactatcaactgatactgagaaggagattgaatcatcatcaaggaaaactgaaacatcccctcctcgaaaggctcagattgttggatggccaccagttagatcttacaggaagaacaacattcagagtaagaagaatgaatctgagcatgagggtcaaggaatctatgtgaaagtaagtatggatggtgcaccatacttgaggaaaatagatctgagttgttacaaaggatactcagagttgcttaaagctttagaagtgatgttcaaattctctgtgggagagtactttgagagagatggatataaaggttcagactttgtgcctacttatgaagacaaagatggtgattggatgctcattggtgatgttccatgggagatgttcatatgtacgtgcaagagactaaggatcatgaaaggatcagaagccaaaggtttaggctgtggtgtatgagatatatcttcaagaaatctaacagagacacaaaagaacttgaagaaaaatagagtttcttttggttcagagaaatctctgtctgtgcttgggttgtcgggtttctcgggcaagatctatgttcattggattgaatccaattcatagcctttatttacctcatcggtaaaattcaaatgtaaacatgcttaatggtcttaagcatatgaaactggaacctaattacattttgtttcagaaacagggcaaaaggttgtccttaaatctttggttatgtgtattacattaattaaagtgttatgaagattgaagagttgtttttatatttgtagcaattctgttttgcgttctcattgatcaaagagattttcaagc

SEQ ID NO: 31623 - protein, 266 aa, Arabidopsis thaliana
  misc_feature (1)..(266): Ceres Seq. ID no. 13588288
LLLLPTSLAFFPLSLIQKTVSSLSTSIYLYSPLTWIKHSASSKPLIFIISSFSISLLSFKDNNQKLFFLSSPAILEEMDEFVNLKETELRLGLPGTDNVCEAKERVSCCNNNNKRVLSTDTEKEIESSSRKTETSPPRKAQIVGWPPVRSYRKNNIQSKKNESEHEGQGIYVKVSMDGAPYLRKIDLSCYKGYSELLKALEVMFKFSVGEYFERDGYKGSDFVPTYEDKDGDWMLIGDVPWEMFICTCKRLRIMKGSEAKGLGCGV

SEQ ID NO: 31624 - protein, 189 aa, Arabidopsis thaliana
  misc_feature (1)..(189): Ceres Seq. ID no. 13588289
MDEFVNLKETELRLGLPGTDNVCEAKERVSCCNNNNKRVLSTDTEKEIESSSRKTETSPPRKAQIVGWPPVRSYRKNNIQSKKNESEHEGQGIYVKVSMDGAPYLRKIDLSCYKGYSELLKALEVMFKFSVGEYFERDGYKGSDFVPTYEDKDGDWMLIGDVPWEMFICTCKRLRIMKGSEAKGLGCGV

SEQ ID NO: 31625 - DNA, 1964 bp, Arabidopsis thaliana
  misc_feature (1)..(1964): Ceres Seq. ID no. 13588303
acctctattttttcaagtctgcagctttttgaagctatatttttcagatctttcactctctctctagctacttctttttgtctttaagttttcaaattttattaaatttttatattctactgcctcctcagcttctctcacaaagcacaaatccaagccccaaatcaaatcccaccattgttttattacctcaatccaagaacactagacacaacaaaaatctctgtttcttatccaaatttctgatctttgtggagaacaatattttgattggatgtgagacaaatgggttgtttacattccaaaactgctaatcttccttcttctgatgatccatcagctccaaacaaaccagaatcagtaaatggggaccaagtggatcaggaaatccaaaatttcaaagaatttgaactaaatgagttgaggaaagctaccaatgggtttagtcctagctgcattgtctctgaaggtggagagaaagctcctaatgtcgtttacagagggaagcttgaagggaatcatcttgtagctatcaagcgattctctaggcaatcttggcctgatgctcaacagtttgtggtggaagcgactggtgttgggaagcttagaaacaagagaatagttagtttgatcggttgctgtgctgaaggagatgagaggttgttggtggcagagtatatgcccaatgatactctctcaaagcatctcttccactgggaaaagcagccacttccatgggatatgcgtgttcgaatcgcagactatattgcagaagcacttgattactgcaatattgagaaccgaaaaatctatcatgacctcaatgcatacagaatcctcttcgacgaggaaggtgatcctcgtctatctacttttggtcttatgaagaacagtagagatggcaaaagctatagcacaaacttagcttatactccacctgagtttttacggacaggtagagtcattcctgaaagtgtgatattcagttatggaactattcttttagatcttttaagcggcaaacacattccacctagccatgcccttgatatcataagagggaaaaatgctttgcttcttatggattcatctcttgaagggcaatatgcgaatgatgatgcgactaaattagttgatcttgcttcaaaatgccttcaatcagaggcaaaggatcgaccagataccaaatttcttctctctgcagtagcaccactacaaaagcaagaagaggttgcttctcatgtcttaatgggcttaccaaagaacacagtaatattaccaactatgctttctcctcttggaaaggcctgtgcaaagatggaccttgcgacatttcacgacattttgcttaaaaccggttacagagatgaagaaggtgcagaaaatgagctttcatttcaagaatggacacaacaagtgcaggagatgcttaacacaaaaaagttcggggacattgctttcagagacaaggatttcaagaactcaattgaatactactccaagttggtggggatgatgccggttccttctgcaacagttttcgctagacgggctttctcctacttaatgacagaccaacaggagcttgcactgagagatgcaatgcaggcacaggtgtgcataccagaatggccaacagctttttacttgcaggctttagcgctctcaaagctcggaatggagactgatgctcaagatatgctcaacgatggcgctgcatatgatgctaagcgacagaatagctggcgctgctaagctattagaggaagtcccaaatatttatgggtcttttcagactgtaactgaaaggtgtgtatgcatgtaagagagagatggaatgtgttgtttacttttgtgaaatgagagcttctttttttgcatgaatctttatgaaaagtcaaatcttttggggaaagagagaataagactgcaaataactaatttgattccttcttccttatggc

SEQ ID NO: 31626 - protein, 489 aa, Arabidopsis thaliana
  misc_feature (1)..(489): Ceres Seq. ID no. 13588304
MGCLHSKTANLPSSDDPSAPNKPESVNGDQVDQEIQNFKEFELNELRKATNGFSPSCIVSEGGEKAPNVVYRGKLEGNHLVAIKRFSRQSWPDAQQFVVEATGVGKLRNKRIVSLIGCCAEGDERLLVAEYMPNDTLSKHLFHWEKQPLPWDMRVRIADYIAEALDYCNIENRKIYHDLNAYRILFDEEGDPRLSTFGLMKNSRDGKSYSTNLAYTPPEFLRTGRVIPESVIFSYGTILLDLLSGKHIPPSHALDIIRGKNALLLMDSSLEGQYANDDATKLVDLASKCLQSEAKDRPDTKFLLSAVAPLQKQEEVASHVLMGLPKNTVILPTMLSPLGKACAKMDLATFHDILLKTGYRDEEGAENELSFQEWTQQVQEMLNTKKFGDIAFRDKDFKNSIEYYSKLVGMMPVPSATVFARRAFSYLMTDQQELALRDAMQAQVCIPEWPTAFYLQALALSKLGMETDAQDMLNDGAAYDAKRQNSWRC

SEQ ID NO: 31627 - protein, 358 aa, Arabidopsis thaliana
  misc_feature (1)..(358): Ceres Seq. ID no. 13588305
MPNDTLSKHLFHWEKQPLPWDMRVRIADYIAEALDYCNIENRKIYHDLNAYRILFDEEGDPRLSTFGLMKNSRDGKSYSTNLAYTPPEFLRTGRVIPESVIFSYGTILLDLLSGKHIPPSHALDIIRGKNALLLMDSSLEGQYANDDATKLVDLASKCLQSEAKDRPDTKFLLSAVAPLQKQEEVASHVLMGLPKNTVILPTMLSPLGKACAKMDLATFHDILLKTGYRDEEGAENELSFQEWTQQVQEMLNTKKFGDIAFRDKDFKNSIEYYSKLVGMMPVPSATVFARRAFSYLMTDQQELALRDAMQAQVCIPEWPTAFYLQALALSKLGMETDAQDMLNDGAAYDAKRQNSWRC

SEQ ID NO: 31628 - protein, 337 aa, Arabidopsis thaliana
  misc_feature (1)..(337): Ceres Seq. ID no. 13588306
MRVRIADYIAEALDYCNIENRKIYHDLNAYRILFDEEGDPRLSTFGLMKNSRDGKSYSTNLAYTPPEFLRTGRVIPESVIFSYGTILLDLLSGKHIPPSHALDIIRGKNALLLMDSSLEGQYANDDATKLVDLASKCLQSEAKDRPDTKFLLSAVAPLQKQEEVASHVLMGLPKNTVILPTMLSPLGKACAKMDLATFHDILLKTGYRDEEGAENELSFQEWTQQVQEMLNTKKFGDIAFRDKDFKNSIEYYSKLVGMMPVPSATVFARRAFSYLMTDQQELALRDAMQAQVCIPEWPTAFYLQALALSKLGMETDAQDMLNDGAAYDAKRQNSWRC

SEQ ID NO: 31629 - DNA, 1726 bp, Arabidopsis thaliana
  misc_feature (1)..(1726): Ceres Seq. ID no. 13588307
atgttgcatatgattttatctcaaagagtaatccttttacgaaaatatcactcttctgcaaatgcccttgttaccaaatcaccaaattctatccccgagttggttaaacatattgattcggatctgatacgtaatgcacataaggtgttcgacgaaattcctgagttagatgtcatttctgctacagcggtgattggtcgctttgtgaaggaaagcagacatgtggaagcaagtcaagccttcaaaaggttgttgtgtttaggcataaggccaaatgagttcacgtttggcacggtcattgggtcttctacaacttcgagagatgtcaaattgggtaagcagcttcattgttatgcgttaaagatgggacttgcgtcgaatgtgtttgttggtagtgcggttttgaactgttatgtgaaactgagtacgttgacagatgctcgtagatgttttgatgacactagagacccaaacgtagtttctattaccaatttgattagtgggtaccttaagaaacatgaatttgaagaagctctttcgttgtttagagcaatgcctgagagaagtgttgttacttggaatgcagttattggagggtttagccagacggggcggaacgaagaggctgtgaatacttttgtggatatgttaagggaaggtgtggtgatacctaacgaatcaaccttcccttgtgctataacagccatatctaatatagcttctcatggtgctggtaagagtattcacgcctgcgctataaagttcttggggaagcgattcaatgtctttgtttggaactctctgatcagtttttactcaaaatgtgggaacatggaagatagtcttctggctttcaacaagctcgaagaagaacaacggaacattgtatcttggaactctatgatatggggttatgcgcacaacggaagaggagaagaagctgtagccatgtttgagaaaatggttaaagacacaaacctgagaccaaacaacgtgacaatccttggagtattatttgcgtgtaaccatgcgggcctaatacaagaagggtacatgtattttaacaaagctgtgaatgattatgatgatccaaacctactagaaccggagcactatgcttgtatggtggatatgctttctaggtccggccgtttcaaagaagcagaagagcttattaaaagtatgcctcttgacccaggaatcgggttttggaaggcattgcttgggggatgccagattcactcaaacaagcgtctggctaaattagcggcgtcaaaaatcttggaattggatcctagagatgtttcatcatacgtaatgctttcaaatgcttattctgctatggaaaactggcagaatgtgtcgctgatacggaggaaaatgaaggagactggtttaaagcgttttacgggatgtagttggattgaagttagagaccaaattcgtgtctttgtgaatgctgacaagaacaacgaacttaaggatgaagtctataggatgttggcacttgtttctcaacatcttgaagaaaatgaatgttggaaagacttgtgaatacaacacatcatgttttttctcttctgctgttcttaaaaaggaagaagtaaatcgcatagtaatttgtatcactgcagcaatcaaacagtatcaaaacgataccatcactatttattgatataagatatatcaataagcctgtgacttgcatagtcattacttcattact

SEQ ID NO: 31630 - protein, 517 aa, Arabidopsis thaliana
  misc_feature (1)..(517): Ceres Seq. ID no. 13588308
MLHMILSQRVILLRKYHSSANALVTKSPNSIPELVKHIDSDLIRNAHKVFDEIPELDVISATAVIGRFVKESRHVEASQAFKRLLCLGIRPNEFTFGTVIGSSTTSRDVKLGKQLHCYALKMGLASNVFVGSAVLNCYVKLSTLTDARRCFDDTRDPNVVSITNLISGYLKKHEFEEALSLFRAMPERSVVTWNAVIGGFSQTGRNEEAVNTFVDMLREGVVIPNESTFPCAITAISNIASHGAGKSIHACAIKFLGKRFNVFVWNSLISFYSKCGNMEDSLLAFNKLEEEQRNIVSWNSMIWGYAHNGRGEEAVAMFEKMVKDTNLRPNNVTILGVLFACNHAGLIQEGYMYFNKAVNDYDDPNLLEPEHYACMVDMLSRSGRFKEAEELIKSMPLDPGIGFWKALLGGCQIHSNKRLAKLAASKILELDPRDVSSYVMLSNAYSAMENWQNVSLIRRKMKETGLKRFTGCSWIEVRDQIRVFVNADKNNELKDEVYRMLALVSQHLEENECWKDL

SEQ ID NO: 31631 - protein, 514 aa, Arabidopsis thaliana
  misc_feature (1)..(514): Ceres Seq. ID no. 13588309
MILSQRVILLRKYHSSANALVTKSPNSIPELVKHIDSDLIRNAHKVFDEIPELDVISATAVIGRFVKESRHVEASQAFKRLLCLGIRPNEFTFGTVIGSSTTSRDVKLGKQLHCYALKMGLASNVFVGSAVLNCYVKLSTLTDARRCFDDTRDPNVVSITNLISGYLKKHEFEEALSLFRAMPERSVVTWNAVIGGFSQTGRNEEAVNTFVDMLREGVVIPNESTFPCAITAISNIASHGAGKSIHACAIKFLGKRFNVFVWNSLISFYSKCGNMEDSLLAFNKLEEEQRNIVSWNSMIWGYAHNGRGEEAVAMFEKMVKDTNLRPNNVTILGVLFACNHAGLIQEGYMYFNKAVNDYDDPNLLEPEHYACMVDMLSRSGRFKEAEELIKSMPLDPGIGFWKALLGGCQIHSNKRLAKLAASKILELDPRDVSSYVMLSNAYSAMENWQNVSLIRRKMKETGLKRFTGCSWIEVRDQIRVFVNADKNNELKDEVYRMLALVSQHLEENECWKDL

SEQ ID NO: 31632 - protein, 396 aa, Arabidopsis thaliana
  misc_feature (1)..(396): Ceres Seq. ID no. 13588310
MGLASNVFVGSAVLNCYVKLSTLTDARRCFDDTRDPNVVSITNLISGYLKKHEFEEALSLFRAMPERSVVTWNAVIGGFSQTGRNEEAVNTFVDMLREGVVIPNESTFPCAITAISNIASHGAGKSIHACAIKFLGKRFNVFVWNSLISFYSKCGNMEDSLLAFNKLEEEQRNIVSWNSMIWGYAHNGRGEEAVAMFEKMVKDTNLRPNNVTILGVLFACNHAGLIQEGYMYFNKAVNDYDDPNLLEPEHYACMVDMLSRSGRFKEAEELIKSMPLDPGIGFWKALLGGCQIHSNKRLAKLAASKILELDPRDVSSYVMLSNAYSAMENWQNVSLIRRKMKETGLKRFTGCSWIEVRDQIRVFVNADKNNELKDEVYRMLALVSQHLEENECWKDL

SEQ ID NO: 31633 - DNA, 3282 bp, Arabidopsis thaliana
  misc_feature (1)..(3282): Ceres Seq. ID no. 13588315
agttgtgcctttctttgtttcgcagtagggttgaagcggatagtacgccacctctatctctctctcaccctatcgaactcgcgaagaacatcttcttcttcttcttctccgtcttcgtcttcgcgagctctctcagtagcgcaataaaatgggggcttcgcttcctcctaaggaggccaacctcttcaagctcatcgtcaaatcatatgagactaagcagtacaagaagggactcaaggcagctgatgccatattaaaaaagtttcctgatcatggagagactttatcgatgaaaggactgactctaaactgtatggaccgcaaaactgaagcatatgagcttgttcgacttggagtgaagaatgatatcaaaagccatgtttgctggcatgtgcttggtcttttgtaccggtcagacagagagtatagagaagcaatcaaatgctaccgaaatgctcttagaatagatcctgataaccttgaaatactcagagacctctcacttctgcaggcacaaatgcgggacttatccggttttgtggagaccaggcagcagcttttgacattgaagcctaatcaccgaatgaactggattggctttgcagtctctcagcatttaaacgcaaatgcttctaaagctgttgaaattttggaagcgtatgaaggcaccttagaggatgactatcctcctgagaacgagctaattgaacacacagaaatgattctatacaaggtttccttgcttgaggagagtggttcttttgacaaagctcttgaggagttgcacaaaaaagagccgaaaatagttgataagttgtcttacaaagaacaagaggtatctctcttgtcaaaggttggtcgtctagaagaagccaataaactctacagggttttactttccatgaaccctgacaattacagatatcatgagggcctccaaaaatgccttggattgtattcagaaagtggtcaatattcgtccgaccagattgaaaagttaaatgctttgtaccagtctctaagtgagcagtacactcggtcatccgctgttaagaggataccattggattttctgcaagatgagaactttaaggaggctgtagcaaagtacattaaacctcttttgacaaagggtgttccttcattattttctgatctctcttctctgtatgatcaccctcgcaagcctgatatattggagcaactagttgttgagatgaaacattcgattgggactacaggaagtttcccaggaagtgatgtaaaagagcccccttctacactattgtggacattgtttttcttggctcagcattatgacaggcgtggtcaatatgatgttgcgctctgtaaaattgatgaggccattgctcatacgccaacagtgattgatctgtactccgtcaagagccgaataatgaagcatgcaggagacttgactgccgctgctgcacttgccgatgaagctagaggcatggacctagcagatcgttatataaacagtgaatgcgttaagcgtatgttacaagcagatcaggtgcccttggctgagaaaactgctgttttatttaccaaagagggggatcagctcaacaatcttcatgacatgcagtgcatgtggtatgatcttgcatctggagatagctatttccgtcagggtgatcttggacgtgctttgaagaagtttttggctgtggagaagcactatgctgacatttctgaagatcaatttgatttccactcgtattgtttaaggaaaatgactttgcgttcatatgttgatatgcttaagttccaagaccgattgcactcattcccatatttccacaaagcagcaatcagagctatcaggtgctacctgaaattgcatgactctcccaagtcaactgctggagaagatgaaatgtcaaagttggctcctgctcagaagaagaaaatcaagaagcagaaaaaggcagaagcccgagctaagaaagaagctgagagtaagagtgaagaatcaactgccagtggtgcctctaagtctggcaaacgaaatgtgaaacctgtagacccagatcctcatgggcaaaagttaattcaggttgaggagccaatggcagaggcttcaaagtacttgagactactccagaaacattcacctaattctttggagactcatttactttcctttgaggtcaatatgagaaaacagaagtttctgcttgcattccaggctgtcaagcaattgcttaaattgggtgcagagaaccctgattcacatcgttccttggttaaattctttctcatgacagaatcgataagtgctccaacgactgaagctgagaaacttcgttggagggtcctagaggctgagcgcccatcaatcagtcaattgcagaataaatcactaatggaagcaaacaaagagtttcttggtagacacgaagattctttggtgcacagagctgcatatgcagaaatgctgtatattttagatccaagcaagaaaaccgaggcaatcaaaataattgaagactcaaccaataaagtagtgcaaacaaatgaagctctaggacaagcaagagaatggaaactaaaagactgtatagctgttcatacgctcctagacacagttcttctcgactcacaagctgcctccagatggaaatcacgctgcgccgagtattttccctgttcaactcactttgaaggcaagcattgctctttgatgcctgattcagtgtacaactcatcccgcaagagcaatgagaacggtgacacgccaaaccatccaatgggtcagactgaattgagcgacggacaactcgaagcattcaagagcctctcagttgcaacctgaaaaccctcttagctatcaataagaagcaaatcaacccaggagataatttacagaagatggaagatctgttcctacagacccggatcaaacttgagatttaatgaatctttccccgaggtgtgtggatcagaaaatgttttggagttgtaacatgccaaatgtgtataattgtttttctatataaggctgggtttcaagtttgaagaacaatgccacaaaaaaagagaggggtcttgtctttttttttttcttgttttttttcgttttgttctctccacactttaaagaggatttctctgatgttgtacccttttatctccttcttttttcggtttctccacattatttattttctccattacaatgtttaagcttcttgacatctctggaaaattttgatttgacgagcctacctttgagtgagacgttacatctttttc

SEQ ID NO: 31634 - protein, 897 aa, Arabidopsis thaliana
  misc_feature (1)..(897): Ceres Seq. ID no. 13588316
MGASLPPKEANLFKLIVKSYETKQYKKGLKAADAILKKFPDHGETLSMKGLTLNCMDRKTEAYELVRLGVKNDIKSHVCWHVLGLLYRSDREYREAIKCYRNALRIDPDNLEILRDLSLLQAQMRDLSGFVETRQQLLTLKPNHRMNWIGFAVSQHLNANASKAVEILEAYEGTLEDDYPPENELIEHTEMILYKVSLLEESGSFDKALEELHKKEPKIVDKLSYKEQEVSLLSKVGRLEEANKLYRVLLSMNPDNYRYHEGLQKCLGLYSESGQYSSDQIEKLNALYQSLSEQYTRSSAVKRIPLDFLQDENFKEAVAKYIKPLLTKGVPSLFSDLSSLYDHPRKPDILEQLVVEMKHSIGTTGSFPGSDVKEPPSTLLWTLFFLAQHYDRRGQYDVALCKIDEAIAHTPTVIDLYSVKSRIMKHAGDLTAAAALADEARGMDLADRYINSECVKRMLQADQVPLAEKTAVLFTKEGDQLNNLHDMQCMWYDLASGDSYFRQGDLGRALKKFLAVEKHYADISEDQFDFHSYCLRKMTLRSYVDMLKFQDRLHSFPYFHKAAIRAIRCYLKLHDSPKSTAGEDEMSKLAPAQKKKIKKQKKAEARAKKEAESKSEESTASGASKSGKRNVKPVDPDPHGQKLIQVEEPMAEASKYLRLLQKHSPNSLETHLLSFEVNMRKQKFLLAFQAVKQLLKLGAENPDSHRSLVKFFLMTESISAPTTEAEKLRWRVLEAERPSISQLQNKSLMEANKEFLGRHEDSLVHRAAYAEMLYILDPSKKTEAIKIIEDSTNKVVQTNEALGQAREWKLKDCIAVHTLLDTVLLDSQAASRWKSRCAEYFPCSTHFEGKHCSLMPDSVYNSSRKSNENGDTPNHPMGQTELSDGQLEAFKSLSVAT

SEQ ID NO: 31635 - protein, 850 aa, Arabidopsis thaliana
  misc_feature (1)..(850): Ceres Seq. ID no. 13588317
MKGLTLNCMDRKTEAYELVRLGVKNDIKSHVCWHVLGLLYRSDREYREAIKCYRNALRIDPDNLEILRDLSLLQAQMRDLSGFVETRQQLLTLKPNHRMNWIGFAVSQHLNANASKAVEILEAYEGTLEDDYPPENELIEHTEMILYKVSLLEESGSFDKALEELHKKEPKIVDKLSYKEQEVSLLSKVGRLEEANKLYRVLLSMNPDNYRYHEGLQKCLGLYSESGQYSSDQIEKLNALYQSLSEQYTRSSAVKRIPLDFLQDENFKEAVAKYIKPLLTKGVPSLFSDLSSLYDHPRKPDILEQLVVEMKHSIGTTGSFPGSDVKEPPSTLLWTLFFLAQHYDRRGQYDVALCKIDEAIAHTPTVIDLYSVKSRIMKHAGDLTAAAALADEARGMDLADRYINSECVKRMLQADQVPLAEKTAVLFTKEGDQLNNLHDMQCMWYDLASGDSYFRQGDLGRALKKFLAVEKHYADISEDQFDFHSYCLRKMTLRSYVDMLKFQDRLHSFPYFHKAAIRAIRCYLKLHDSPKSTAGEDEMSKLAPAQKKKIKKQKKAEARAKKEAESKSEESTASGASKSGKRNVKPVDPDPHGQKLIQVEEPMAEASKYLRLLQKHSPNSLETHLLSFEVNMRKQKFLLAFQAVKQLLKLGAENPDSHRSLVKFFLMTESISAPTTEAEKLRWRVLEAERPSISQLQNKSLMEANKEFLGRHEDSLVHRAAYAEMLYILDPSKKTEAIKIIEDSTNKVVQTNEALGQAREWKLKDCIAVHTLLDTVLLDSQAASRWKSRCAEYFPCSTHFEGKHCSLMPDSVYNSSRKSNENGDTPNHPMGQTELSDGQLEAFKSLSVAT

SEQ ID NO: 31636 - protein, 842 aa, Arabidopsis thaliana
  misc_feature (1)..(842): Ceres Seq. ID no. 13588318
MDRKTEAYELVRLGVKNDIKSHVCWHVLGLLYRSDREYREAIKCYRNALRIDPDNLEILRDLSLLQAQMRDLSGFVETRQQLLTLKPNHRMNWIGFAVSQHLNANASKAVEILEAYEGTLEDDYPPENELIEHTEMILYKVSLLEESGSFDKALEELHKKEPKIVDKLSYKEQEVSLLSKVGRLEEANKLYRVLLSMNPDNYRYHEGLQKCLGLYSESGQYSSDQIEKLNALYQSLSEQYTRSSAVKRIPLDFLQDENFKEAVAKYIKPLLTKGVPSLFSDLSSLYDHPRKPDILEQLVVEMKHSIGTTGSFPGSDVKEPPSTLLWTLFFLAQHYDRRGQYDVALCKIDEAIAHTPTVIDLYSVKSRIMKHAGDLTAAAALADEARGMDLADRYINSECVKRMLQADQVPLAEKTAVLFTKEGDQLNNLHDMQCMWYDLASGDSYFRQGDLGRALKKFLAVEKHYADISEDQFDFHSYCLRKMTLRSYVDMLKFQDRLHSFPYFHKAAIRAIRCYLKLHDSPKSTAGEDEMSKLAPAQKKKIKKQKKAEARAKKEAESKSEESTASGASKSGKRNVKPVDPDPHGQKLIQVEEPMAEASKYLRLLQKHSPNSLETHLLSFEVNMRKQKFLLAFQAVKQLLKLGAENPDSHRSLVKFFLMTESISAPTTEAEKLRWRVLEAERPSISQLQNKSLMEANKEFLGRHEDSLVHRAAYAEMLYILDPSKKTEAIKIIEDSTNKVVQTNEALGQAREWKLKDCIAVHTLLDTVLLDSQAASRWKSRCAEYFPCSTHFEGKHCSLMPDSVYNSSRKSNENGDTPNHPMGQTELSDGQLEAFKSLSVAT

SEQ ID NO: 31637 - DNA, 1233 bp, Arabidopsis thaliana
  misc_feature (1)..(1233): Ceres Seq. ID no. 13588327
gaccaaatctgaaatccttagtttttgtgcttcgcgaacagcaagttgagctatggtgaaggagagtgagtactacgacatattaggcgtcaagattgacgcctctggtgctgagattaagaaagcttattatgttcaagcaaggcaagttcatccagacaagaaccctggtgatcctcaagctgctaaaaactttcagatactaggtgaagcttatcaagttctaggcgatccggagaagcgtacagcttatgacaaatatggaaaagaaggggttcaacaggatgcaatggttgatcctgcagctgtgtttggtatgctctttggtagcgagctctttgaggattacgttgggcaacttgcccttgcttcagcagcctcaatcgatgctgaattagaatcgtatgagcctgagattagaaaacagatgcttcaggaaaagatcaaagcgatacaaaaggacagagtagacaagctcgtcactacactgaaaatcaaacttgaaccattcgtggaaggacaaaccgatgaatttgtaaattgggccaccgcagaggcaaaacggctttcaacagctggttttggtgaggcaatgcttcacacagttggttacatttacactagaaaagctgctaaagaactcggaaaggataaacgtttcatgaaagtaccgtttttagccgaatgggttcgtgacaaaggccaccaagtaaaatctcaagtgatggctgcttctggtgcggtcaacttacttctgttgcaggatgaagtgagcaagctgaatcagggagagaacaaagaagagaatattcagaaagccattgaagctaaaaaggatgcaatgcttcaatccctttggcaaataaatgttgttgacatcgaatcaaccttatctcgtgtctgccaagcggtgcttaaagatccaagtgtttcaaaggatgttcttcgagctagagctagaggattgaggaagctgggtaacgttttccagggttctaagaaagcgtattctagagaaaacagcttgcgtcatgaagaagaaacaggagtgaaagtccacaccggagattcctcgaagccggcaacttaaaccaaggttcgaatctatcggttcgaaacagaacaatcaggttttgtgagaattcttgaatgtattgtaacgattaatattgttttattcgtatttatattcaacactaaataaatattgttatgggaagtgatggtttcgtc

SEQ ID NO: 31638 - protein, 345 aa, Arabidopsis thaliana
  misc_feature (1)..(345): Ceres Seq. ID no. 13588328
MVKESEYYDILGVKIDASGAEIKKAYYVQARQVHPDKNPGDPQAAKNFQILGEAYQVLGDPEKRTAYDKYGKEGVQQDAMVDPAAVFGMLFGSELFEDYVGQLALASAASIDAELESYEPEIRKQMLQEKIKAIQKDRVDKLVTTLKIKLEPFVEGQTDEFVNWATAEAKRLSTAGFGEAMLHTVGYIYTRKAAKELGKDKRFMKVPFLAEWVRDKGHQVKSQVMAASGAVNLLLLQDEVSKLNQGENKEENIQKAIEAKKDAMLQSLWQINVVDIESTLSRVCQAVLKDPSVSKDVLRARARGLRKLGNVFQGSKKAYSRENSLRHEEETGVKVHTGDSSKPAT

SEQ ID NO: 31639 - protein, 266 aa, Arabidopsis thaliana
  misc_feature (1)..(266): Ceres Seq. ID no. 13588329
MVDPAAVFGMLFGSELFEDYVGQLALASAASIDAELESYEPEIRKQMLQEKIKAIQKDRVDKLVTTLKIKLEPFVEGQTDEFVNWATAEAKRLSTAGFGEAMLHTVGYIYTRKAAKELGKDKRFMKVPFLAEWVRDKGHQVKSQVMAASGAVNLLLLQDEVSKLNQGENKEENIQKAIEAKKDAMLQSLWQINVVDIESTLSRVCQAVLKDPSVSKDVLRARARGLRKLGNVFQGSKKAYSRENSLRHEEETGVKVHTGDSSKPAT

SEQ ID NO: 31640 - protein, 257 aa, Arabidopsis thaliana
  misc_feature (1)..(257): Ceres Seq. ID no. 13588330
MLFGSELFEDYVGQLALASAASIDAELESYEPEIRKQMLQEKIKAIQKDRVDKLVTTLKIKLEPFVEGQTDEFVNWATAEAKRLSTAGFGEAMLHTVGYIYTRKAAKELGKDKRFMKVPFLAEWVRDKGHQVKSQVMAASGAVNLLLLQDEVSKLNQGENKEENIQKAIEAKKDAMLQSLWQINVVDIESTLSRVCQAVLKDPSVSKDVLRARARGLRKLGNVFQGSKKAYSRENSLRHEEETGVKVHTGDSSKPAT

SEQ ID NO: 31641 - DNA, 1118 bp, Arabidopsis thaliana
  misc_feature (1)..(1118): Ceres Seq. ID no. 13588331
ggcagtcaaaggtccgtcaaaggcaattttcccggaaaattcttttgggagctgagaaagtgagagctgtgaggtatgagtgtgggactgaaagttagcgcgttcttacatccaacgcttgcgttatcctcgagagatgtctctctctcatcctcatcatcttctctctatcttgatcggaaaattctccgaccaggctccgggagacggtggtgtaaatcccgaagaaccgaaccaatattggctgttgtagagtcaagtcgagtaccggagcttgattcttcttcagaaccagttcaagtattcgatggatcaacaaggttgtacatatcttacacttgcccatttgctcagcgtgcgtggattgctcgcaactacaagggtctgcaaaacaagatagaacttgtaccgatcgatcttaaaaacaggcctgcttggtataaggagaaagtttactcggctaacaaggtgcctgcattagagcacaataaccgagtattgggagagagccttgatctgattaagtacattgacactaattttgaagggccttcgcttacacccgatggtttagagaagcaagttgtagctgatgagttactctcttacactgactccttctccaaggctgtaagatccacattaaacggcactgacactaatgcagcagatgttgcatttgattacatcgagcaggctctttccaaattcaatgaagggcctttctttcttggtcaatttagtttggttgatgttgcatatgctcctttcatagagagatttcggcttatcttaagtgatgtgatgaacgtcgatattacatctggtcggcctaaccttgccctttggattcaggagatgaacaaaatcgaagcttacaccgaaacccgtcaagatccacaagagcttgttgaaagatacaagagacgagtccaagcagaagcacgtctctaaccagatggttctccggatatctccatttacaagggtttagaaggatcaaatgggaagagatattgtaaccaaagttttttatatatataaattatattgtatcggtaaaagcatctacatgacatgcaacaattgttttcatttatatcagaattcatgagacc

SEQ ID NO: 31642 - protein, 292 aa, Arabidopsis thaliana
  misc_feature (1)..(292): Ceres Seq. ID no. 13588332
MSVGLKVSAFLHPTLALSSRDVSLSSSSSSLYLDRKILRPGSGRRWCKSRRTEPILAVVESSRVPELDSSSEPVQVFDGSTRLYISYTCPFAQRAWIARNYKGLQNKIELVPIDLKNRPAWYKEKVYSANKVPALEHNNRVLGESLDLIKYIDTNFEGPSLTPDGLEKQVVADELLSYTDSFSKAVRSTLNGTDTNAADVAFDYIEQALSKFNEGPFFLGQFSLVDVAYAPFIERFRLILSDVMNVDITSGRPNLALWIQEMNKIEAYTETRQDPQELVERYKRRVQAEARL

SEQ ID NO: 31643 - DNA, 2082 bp, Arabidopsis thaliana
  misc_feature (1)..(2082): Ceres Seq. ID no. 13588352
atggcgagtactagtagtggtggtggtggtggtggtgataagaagaagaagaaaggtttctctgtaaaccctaaagattataaacttatggaagaagttggatatggtgctagtgctgttgttcatcgtgctatttatcttcctactaatgaagttgttgctatcaagtctttggatctcgatcgctgcaatagtaatctggatgatataaggagggaggctcagactatgactttgatagaccatccgaatgttataaagtcgttttgttcgtttgctgttgatcatcatctatgggtcgttatgccatttatggctcagggttcgtgtttgcatctaatgaaagcagcgtatccagatggatttgaagaggcggctatatgttctatgctgaaagaaacacttaaagctcttgattatcttcatagacaagggcatatccatcgagatgttaaggctggaaacatacttcttgatgacactggcgagattaagttaggtgattttggtgtctctgcatgtttgtttgacaatggcgataggcaacgtgcaagaaatacatttgttggtactccatgctggatggcaccggaagtcttgcagccagggagtggatacaattcaaaggctgatatatggtcttttggaataacggcgctggagttggctcacggtcatgcacctttctcaaaatatccccctatgaaggtactcttaatgactatccaaaatgcaccacctggccttgattatgaccgtgataagaagttttcaaagaagatgtccagctgcgctcagtcctttaaagaattggtagcattgtgtctggtgaaagatcaaacaaaaaggccaactgctgaaaaattgttgaaacactcatttttcaagaatgtgaagcctccagagatctgtgtaaaaaaattatttgtcgatttaccacctctttggactcgcgtaaaagctcttcagagtgaataccaaagaggagtaagtgcttggaacttcaatatcgaagatttgaaagaacaagcatctttgctagatgatgatgacattctaacagagagtagggaagaagaagaatcttttggcgaacagttgcataataaggtgaatgacagagggcaagtatctggtagtcaattgctatctgaaaacatgaatggaaaggaaaaagcttcagatactgaggtggtagaacctatctgtgaagagaaatccactctcaattcaaccacttcttctgtggaacaaccggcatcaagttcagaacaagacgttccacaggccaagggtaagccagtgagactccagactcatagtggaccactttcatccggtgtcgtgttaatcaattcagactcagagaaggttcatggttatgaaaggtctgagagtgaacggcaactgaaatcatcagtccggagggcacccagctttagtggtcctttgaatcttccaaatcgtgcttcagcaaacagtctttcagctcctatcaaatcttctggaggatttcgtgattctatagatgacaagtcgaaggctaatgtggttcaaatcaaaggaagattttcagtaacatcagaaaacttggatcttgcaagggcatcccctttgagaaaatctgccagtgttgggaattggatacttgattctaaaatgccaacgggccaggccatcaaggagtcaagtagtcatctctcattcattatacctcagcttcaaaatctgttccagcaaaattcaatgcagcaggatcttattatgaatctagtgaataccttacaacaagctgctgaaacaacagatggttctcaaaatggaaagttgccgcctttgcctcgaggatctgacagcaatggaaccgttgtagaacttacagcagctgagcgagagaggttactacttaccaagataaccgagcttcgagctaggttgttcctcttcttcaatcaatcacacctttcttataggagatcaatgtggatgaaagagttgacggaagaacttgaagtagaaaaatcaaaacagacccaactgcagcagaaattgaaatcagtcaccggtcgcgagcaattgtaa

SEQ ID NO: 31644 - protein, 693 aa, Arabidopsis thaliana
  misc_feature (1)..(693): Ceres Seq. ID no. 13588353
MASTSSGGGGGGDKKKKKGFSVNPKDYKLMEEVGYGASAVVHRAIYLPTNEVVAIKSLDLDRCNSNLDDIRREAQTMTLIDHPNVIKSFCSFAVDHHLWVVMPFMAQGSCLHLMKAAYPDGFEEAAICSMLKETLKALDYLHRQGHIHRDVKAGNILLDDTGEIKLGDFGVSACLFDNGDRQRARNTFVGTPCWMAPEVLQPGSGYNSKADIWSFGITALELAHGHAPFSKYPPMKVLLMTIQNAPPGLDYDRDKKFSKKMSSCAQSFKELVALCLVKDQTKRPTAEKLLKHSFFKNVKPPEICVKKLFVDLPPLWTRVKALQSEYQRGVSAWNFNIEDLKEQASLLDDDDILTESREEEESFGEQLHNKVNDRGQVSGSQLLSENMNGKEKASDTEVVEPICEEKSTLNSTTSSVEQPASSSEQDVPQAKGKPVRLQTHSGPLSSGVVLINSDSEKVHGYERSESERQLKSSVRRAPSFSGPLNLPNRASANSLSAPIKSSGGFRDSIDDKSKANVVQIKGRFSVTSENLDLARASPLRKSASVGNWILDSKMPTGQAIKESSSHLSFIIPQLQNLFQQNSMQQDLIMNLVNTLQQAAETTDGSQNGKLPPLPRGSDSNGTVVELTAAERERLLLTKITELRARLFLFFNQSHLSYRRSMWMKELTEELEVEKSKQTQLQQKLKSVTGREQL

SEQ ID NO: 31645 - protein, 664 aa, Arabidopsis thaliana
  misc_feature (1)..(664): Ceres Seq. ID no. 13588354
MEEVGYGASAVVHRAIYLPTNEVVAIKSLDLDRCNSNLDDIRREAQTMTLIDHPNVIKSFCSFAVDHHLWVVMPFMAQGSCLHLMKAAYPDGFEEAAICSMLKETLKALDYLHRQGHIHRDVKAGNILLDDTGEIKLGDFGVSACLFDNGDRQRARNTFVGTPCWMAPEVLQPGSGYNSKADIWSFGITALELAHGHAPFSKYPPMKVLLMTIQNAPPGLDYDRDKKFSKKMSSCAQSFKELVALCLVKDQTKRPTAEKLLKHSFFKNVKPPEICVKKLFVDLPPLWTRVKALQSEYQRGVSAWNFNIEDLKEQASLLDDDDILTESREEEESFGEQLHNKVNDRGQVSGSQLLSENMNGKEKASDTEVVEPICEEKSTLNSTTSSVEQPASSSEQDVPQAKGKPVRLQTHSGPLSSGVVLINSDSEKVHGYERSESERQLKSSVRRAPSFSGPLNLPNRASANSLSAPIKSSGGFRDSIDDKSKANVVQIKGRFSVTSENLDLARASPLRKSASVGNWILDSKMPTGQAIKESSSHLSFIIPQLQNLFQQNSMQQDLIMNLVNTLQQAAETTDGSQNGKLPPLPRGSDSNGTVVELTAAERERLLLTKITELRARLFLFFNQSHLSYRRSMWMKELTEELEVEKSKQTQLQQKLKSVTGREQL

SEQ ID NO: 31646 - protein, 617 aa, Arabidopsis thaliana
  misc_feature (1)..(617): Ceres Seq. ID no. 13588355
MTLIDHPNVIKSFCSFAVDHHLWVVMPFMAQGSCLHLMKAAYPDGFEEAAICSMLKETLKALDYLHRQGHIHRDVKAGNILLDDTGEIKLGDFGVSACLFDNGDRQRARNTFVGTPCWMAPEVLQPGSGYNSKADIWSFGITALELAHGHAPFSKYPPMKVLLMTIQNAPPGLDYDRDKKFSKKMSSCAQSFKELVALCLVKDQTKRPTAEKLLKHSFFKNVKPPEICVKKLFVDLPPLWTRVKALQSEYQRGVSAWNFNIEDLKEQASLLDDDDILTESREEEESFGEQLHNKVNDRGQVSGSQLLSENMNGKEKASDTEVVEPICEEKSTLNSTTSSVEQPASSSEQDVPQAKGKPVRLQTHSGPLSSGVVLINSDSEKVHGYERSESERQLKSSVRRAPSFSGPLNLPNRASANSLSAPIKSSGGFRDSIDDKSKANVVQIKGRFSVTSENLDLARASPLRKSASVGNWILDSKMPTGQAIKESSSHLSFIIPQLQNLFQQNSMQQDLIMNLVNTLQQAAETTDGSQNGKLPPLPRGSDSNGTVVELTAAERERLLLTKITELRARLFLFFNQSHLSYRRSMWMKELTEELEVEKSKQTQLQQKLKSVTGREQL

SEQ ID NO: 31647 - DNA, 1596 bp, Arabidopsis thaliana
  misc_feature (1)..(1596): Ceres Seq. ID no. 13588360
ggtttgttttgtggctgacgataaaacagagcacaaaagaaaaaaaaatctagggtttgttttgagactaagaggaagagaaagaagaagaagagaaaattcgtacaattccgccattaaagcttcaacctttaatggcgacaacgactctttcttccttctctctttctcttcctcaacttctccataaacccacaaagcctcttcctttcctcttccttcttcctcgattcaatcggagatttcgaagtctcactatcacttcttcttctacaacttcttcaaacaatttcagtagtaattgtggcgatgatggcttctctcttgacgatttcactctccattctgattctcgatcacctaaaaaatgtgtcctttctgatcttatacaagagattgagccattagatgtgagtttgattcagaaggatgttccagttactactttggatgcaatgaaaagaacaatctcaggcatgttgggtcttcttccatctgataggtttcaggttcatattgagtcactttgggaacctttgtctaagcttttggtatcttcaatgatgactgggtatacattgaggaatgctgaatatcggctttttcttgaaaaaaaccttgatatgagtggtggaggcttggacagccacgcttcggaaaacactgaatatgatatggaagggacgtttcctgatgaagatcatgtttcatccaaaagggatagcagaactcagaacctttctgaaacgattgatgaagaaggtttgggcagagtatcctctgaagctcaagaatatatcttacgtttgcagtcacaattgtcttctgtgaaaaaggaattacaagaaatgagacgaaagaacgctgccctacaaatgcaacaatttgttggcgaagagaagaatgatttgttggactatttacgatctttgcaacctgagaaggtagctgagttgtcagaacctgcggctcctgaggtgaaagagactattcattctgttgttcacggtcttttggcaactctatcaccgaagatgcactctaagtttccagcatcagaagttccacctactgaaacggtgaaagcaaaaagtgatgaagattgtgctgaacttgtagagaacacttcgttgcagtttcagcctcttatctcactgactcgagactaccttgctcgtcttctcttctggtgcatgctattgggacattatctcagaggtttggaatatcgaatggaactgatggaggtcctgtctttgacatgcgatgccaatgggtctgagaacgtcgcttgaagctatctttatacatctcaacattgtcttacatgcgtatcagcggccttgacactcttaaaccaacaaagtgggcaagtgactaggagacaggccagcctttgagctttagctcttgcacatatatgcagctttgtgctggcctgaaaattcatgggcgaggtaaagtgtaacataagaaatcacttctactaaaattatttttcgttgcattatcgtgtgatggatctgcaaagcaataaagctaagtgtaattgtattcaggaatatactcgtttggtcattaagtatagtttgtcct

SEQ ID NO: 31648 - protein, 386 aa, Arabidopsis thaliana
  misc_feature (1)..(386): Ceres Seq. ID no. 13588361
MATTTLSSFSLSLPQLLHKPTKPLPFLFLLPRFNRRFRSLTITSSSTTSSNNFSSNCGDDGFSLDDFTLHSDSRSPKKCVLSDLIQEIEPLDVSLIQKDVPVTTLDAMKRTISGMLGLLPSDRFQVHIESLWEPLSKLLVSSMMTGYTLRNAEYRLFLEKNLDMSGGGLDSHASENTEYDMEGTFPDEDHVSSKRDSRTQNLSETIDEEGLGRVSSEAQEYILRLQSQLSSVKKELQEMRRKNAALQMQQFVGEEKNDLLDYLRSLQPEKVAELSEPAAPEVKETIHSVVHGLLATLSPKMHSKFPASEVPPTETVKAKSDEDCAELVENTSLQFQPLISLTRDYLARLLFWCMLLGHYLRGLEYRMELMEVLSLTCDANGSENVA

SEQ ID NO: 31649 - protein, 279 aa, Arabidopsis thaliana
  misc_feature (1)..(279): Ceres Seq. ID no. 13588362
MKRTISGMLGLLPSDRFQVHIESLWEPLSKLLVSSMMTGYTLRNAEYRLFLEKNLDMSGGGLDSHASENTEYDMEGTFPDEDHVSSKRDSRTQNLSETIDEEGLGRVSSEAQEYILRLQSQLSSVKKELQEMRRKNAALQMQQFVGEEKNDLLDYLRSLQPEKVAELSEPAAPEVKETIHSVVHGLLATLSPKMHSKFPASEVPPTETVKAKSDEDCAELVENTSLQFQPLISLTRDYLARLLFWCMLLGHYLRGLEYRMELMEVLSLTCDANGSENVA

SEQ ID NO: 31650 - protein, 272 aa, Arabidopsis thaliana
  misc_feature (1)..(272): Ceres Seq. ID no. 13588363
MLGLLPSDRFQVHIESLWEPLSKLLVSSMMTGYTLRNAEYRLFLEKNLDMSGGGLDSHASENTEYDMEGTFPDEDHVSSKRDSRTQNLSETIDEEGLGRVSSEAQEYILRLQSQLSSVKKELQEMRRKNAALQMQQFVGEEKNDLLDYLRSLQPEKVAELSEPAAPEVKETIHSVVHGLLATLSPKMHSKFPASEVPPTETVKAKSDEDCAELVENTSLQFQPLISLTRDYLARLLFWCMLLGHYLRGLEYRMELMEVLSLTCDANGSENVA

SEQ ID NO: 31651 - DNA, 1485 bp, Arabidopsis thaliana
  misc_feature (1)..(1485): Ceres Seq. ID no. 13588364
atgcatctgattaatgcggtggcggcggcgaggattttatccggaatcggacaatctaacggtaataacggaggagaagcgattccgtttggatcgtttgagtggatcacttacgccggaatatcttgtttcctcgtactcttcgccgggattatgtctggtcttactttgggacttatgtctcttggtcttgtcgagcttgagattcttcaacgtagtggtactcctaatgagaagaaacaagccgctgcgatttttccggttgttcagaaacagcatcagcttttagtgacactgcttctgtgtaatgctatggctatggaggggcttcctatatatttggataagttattcaatgaatacgttgcgattattctttctgtcacattcgttcttgcttacggtgaggttattcctcaagcgatatgcactaggtatggactcgcggttggagcgaattttgtctggcttgtccgcattttaatgactctctgctatccgattgcctttcccattggcaagattttagatttggtgctgggacacaatgatgctttatttaggcgggctcagttgaaagctcttgtatccattcacagccaagaggctggtaagggaggtgagcttacacatgatgagacgacaatcattagtggagctcttgatttgactgagaagactgcacaagaagccatgacaccaattgagtctaccttctccttggatgtaaattcaaaattggattgggaagctatggggaagattctggcacgaggccatagccgcgttcctgtctactctgggaatccgaaaaacgttatcggacttctcttggtgaagagtcttcttacagttcgccctgaaacagagacccttgtcagcgcagtttgtatacgccggattccaagggttccagctgatatgcctctctatgatatactgaatgagtttcaaaagggaagcagtcacatggctgcagttgtgaaggttaaggggaaaagcaaagtcccaccttcaactttgcttgaagaacacactgatgaaagcaatgactccgacttgactgcacctttgttactaaaacgagagggaaaccatgacaatgtcattgtcacaatcgacaaggctaatggacaatctttctttcaaaacaacgagagtggacctcacgggttttcacatacttcagaggctatcgaggatggtgaggtaattggtatcatcactttagaagatgtctttgaagaacttttgcaagaagagattgtggatgaaactgatgaatatgttgacgtacataaaaggattcgagtagcagcagcagcggctgcttcatcaatagcgagagctccttcaagccggaagttgcttgcgcaaaagggaactggaggacaaaataagcaagggcagacgaataaagttcctggtcaggaacaagataaaatgcttggaactattaccgagccgattcgaagaaacaactga

SEQ ID NO: 31652 - protein, 494 aa, Arabidopsis thaliana
  misc_feature (1)..(494): Ceres Seq. ID no. 13588365
MHLINAVAAARILSGIGQSNGNNGGEAIPFGSFEWITYAGISCFLVLFAGIMSGLTLGLMSLGLVELEILQRSGTPNEKKQAAAIFPVVQKQHQLLVTLLLCNAMAMEGLPIYLDKLFNEYVAIILSVTFVLAYGEVIPQAICTRYGLAVGANFVWLVRILMTLCYPIAFPIGKILDLVLGHNDALFRRAQLKALVSIHSQEAGKGGELTHDETTIISGALDLTEKTAQEAMTPIESTFSLDVNSKLDWEAMGKILARGHSRVPVYSGNPKNVIGLLLVKSLLTVRPETETLVSAVCIRRIPRVPADMPLYDILNEFQKGSSHMAAVVKVKGKSKVPPSTLLEEHTDESNDSDLTAPLLLKREGNHDNVIVTIDKANGQSFFQNNESGPHGFSHTSEAIEDGEVIGIITLEDVFEELLQEEIVDETDEYVDVHKRIRVAAAAAASSIARAPSSRKLLAQKGTGGQNKQGQTNKVPGQEQDKMLGTITEPIRRNN

SEQ ID NO: 31653 - protein, 443 aa, Arabidopsis thaliana
  misc_feature (1)..(443): Ceres Seq. ID no. 13588366
MSGLTLGLMSLGLVELEILQRSGTPNEKKQAAAIFPVVQKQHQLLVTLLLCNAMAMEGLPIYLDKLFNEYVAIILSVTFVLAYGEVIPQAICTRYGLAVGANFVWLVRILMTLCYPIAFPIGKILDLVLGHNDALFRRAQLKALVSIHSQEAGKGGELTHDETTIISGALDLTEKTAQEAMTPIESTFSLDVNSKLDWEAMGKILARGHSRVPVYSGNPKNVIGLLLVKSLLTVRPETETLVSAVCIRRIPRVPADMPLYDILNEFQKGSSHMAAVVKVKGKSKVPPSTLLEEHTDESNDSDLTAPLLLKREGNHDNVIVTIDKANGQSFFQNNESGPHGFSHTSEAIEDGEVIGIITLEDVFEELLQEEIVDETDEYVDVHKRIRVAAAAAASSIARAPSSRKLLAQKGTGGQNKQGQTNKVPGQEQDKMLGTITEPIRRNN

SEQ ID NO: 31654 - protein, 435 aa, Arabidopsis thaliana
  misc_feature (1)..(435): Ceres Seq. ID no. 13588367
MSLGLVELEILQRSGTPNEKKQAAAIFPVVQKQHQLLVTLLLCNAMAMEGLPIYLDKLFNEYVAIILSVTFVLAYGEVIPQAICTRYGLAVGANFVWLVRILMTLCYPIAFPIGKILDLVLGHNDALFRRAQLKALVSIHSQEAGKGGELTHDETTIISGALDLTEKTAQEAMTPIESTFSLDVNSKLDWEAMGKILARGHSRVPVYSGNPKNVIGLLLVKSLLTVRPETETLVSAVCIRRIPRVPADMPLYDILNEFQKGSSHMAAVVKVKGKSKVPPSTLLEEHTDESNDSDLTAPLLLKREGNHDNVIVTIDKANGQSFFQNNESGPHGFSHTSEAIEDGEVIGIITLEDVFEELLQEEIVDETDEYVDVHKRIRVAAAAAASSIARAPSSRKLLAQKGTGGQNKQGQTNKVPGQEQDKMLGTITEPIRRNN

SEQ ID NO: 31655 - DNA, 1148 bp, Arabidopsis thaliana
  misc_feature (1)..(1148): Ceres Seq. ID no. 13588370
acttttgctttcttcaacctgtcgacaacactcccgaatttttctctggcagtgtgtttaaaaaccaatggcgctagttgtgatttgtgggcaaccttgtagtggtaagtcaatagctgcagtaactttagctgaaacattgaaagagtctgaaacgaaacagagtgttaggatcatcgatgaggcttcgtttcatctagaccgcaaccaaaactatgctaacatgcctgctgagaagaatctgagaggaaagcttaggtcagatgttgatagatcagtttcgacaggcgagattgttattgtagattccttgaatagtatcaaaggttacagatatgagctatggtgtatcgctcgtgctgctgggattaggtattgtgttgtttattgtgatgtagatgaagctcattgtaggcaatggaataaggaacggagtgatagaggtgaagatggatatgacgatggtatattcgaagatctggttagaagatttgagaaacctgagagaagaaaccgatgggattcacctctctttgagctatacccttctcgtgaagttatagacaaatcctctcctgtgattttagaggctgtgacttatctaaccaagactgttgactccaaaacccaagatgtgagaattctccaaccaagtattgccactcaggctgctagattttcagaagcaaattctctttacgagttggacagagcgacacaagaaatcatcaacgcgattgtggaacaacaatcactgggcgcggctataagcagagttactcttggcaatgaactacctccgattgaaatctgcagaccgattgggctaccggagctaaggaggcttcgaagaacgtttgttaaattgatgggtcaatcgagtctaagcggtccaccgttaccaactgatgcagacagtgcaaagagacgttttgtggattacttgaacagagagtttggaggtaataacgcttgaaatttgttgggtgaaaaacatcttatttcttaaaggtttggttatgtattttcttaactcaagacttgttcttcttcatcgaaattcttttttggggctaaattgatgtgttataataggcccgttataataatgcaaacatattttggggctatagtatattttcttgtcc

SEQ ID NO: 31656 - protein, 302 aa, Arabidopsis thaliana
  misc_feature (1)..(302): Ceres Seq. ID no. 13588371
MALVVICGQPCSGKSIAAVTLAETLKESETKQSVRIIDEASFHLDRNQNYANMPAEKNLRGKLRSDVDRSVSTGEIVIVDSLNSIKGYRYELWCIARAAGIRYCVVYCDVDEAHCRQWNKERSDRGEDGYDDGIFEDLVRRFEKPERRNRWDSPLFELYPSREVIDKSSPVILEAVTYLTKTVDSKTQDVRILQPSIATQAARFSEANSLYELDRATQEIINAIVEQQSLGAAISRVTLGNELPPIEICRPIGLPELRRLRRTFVKLMGQSSLSGPPLPTDADSAKRRFVDYLNREFGGNNA

SEQ ID NO: 31657 - protein, 250 aa, Arabidopsis thaliana
  misc_feature (1)..(250): Ceres Seq. ID no. 13588372
MPAEKNLRGKLRSDVDRSVSTGEIVIVDSLNSIKGYRYELWCIARAAGIRYCVVYCDVDEAHCRQWNKERSDRGEDGYDDGIFEDLVRRFEKPERRNRWDSPLFELYPSREVIDKSSPVILEAVTYLTKTVDSKTQDVRILQPSIATQAARFSEANSLYELDRATQEIINAIVEQQSLGAAISRVTLGNELPPIEICRPIGLPELRRLRRTFVKLMGQSSLSGPPLPTDADSAKRRFVDYLNREFGGNNA

SEQ ID NO: 31658 - DNA, 1384 bp, Arabidopsis thaliana
  misc_feature (1)..(1384): Ceres Seq. ID no. 13588389
gaccaaaacacacacacactcactctcaatatctagtttttcccttgtttctgatcagtgtgatcacgtagagtgccttgaaggagaagaaagaaacaaaaacaaaggaaaatgggatacctttttcaagaaaccttaagctctaaccctaaaactccaattgttgttgatgatgataacgagttgggtttgatggccgtgagacttgccaacgccgccgcctttcctatggttctcaaagccgccctcgagcttggtgtctttgacactctctacgccgcagcctctcgcaccgactcattcctctcaccctatgaaatagcaagtaagctaccaactacacctcgtaaccctgaagcgccggttttgttggaccgcatgcttcgtctactcgctagctactccatggtcaagtgtggtaaggccttatccggaaagggcgagagggtctacagagccgagccgatttgcaggttcttcttgaaggataacattcaagatattggatcccttgcttctcaagtcatcgtcaatttcgacagcgtcttccttaatacctgggcacagttgaaagatgtggtgctagaaggaggagatgcgtttggtcgcgcacatggtggtatgaaactctttgactatatgggtacagatgagagattcagcaagctctttaaccagaccggattcacaatcgcggtcgttaagaaggcccttgaagtctatgaaggcttcaaaggtgtgaaagttttagttgatgttggaggaggagttggtaacactcttggtgttgttacttctaaatatcccaatattaagggtatcaactttgatctaacctgtgccttggcacaagcaccttcttatcccggtgtggagcatgttgccggagatatgtttgtggatgtcccaaccggagatgccatgatcttgaaacgtatacttcatgattggaccgacgaagattgtgtcaagattcttaagaattgttggaaatcactacctgaaaacggtaaagtggttgttatagaattagtcactcctgatgaggcagagaatggtgacatcaatgcgaacattgcctttgacatggacatgttaatgttcacccaatgttctggtggaaaagagcgatcaagagctgagtttgaagctttagctgcagcttctggcttcacccattgcaagttcgtttgccaagcttatcactgctggattattgaattctgtaaataaaatgtgtgatacaaatctaaatcgtcgtttctagtatttttcttttttgttgatatgtgattatcgttgttatttcttattttcatatttgtttgaaatggtcatgcatgtctttgtcttcaagcaatctagcaataaaaataaggtttta

SEQ ID NO: 31659 - protein, 373 aa, Arabidopsis thaliana
  misc_feature (1)..(373): Ceres Seq. ID no. 13588390
MGYLFQETLSSNPKTPIVVDDDNELGLMAVRLANAAAFPMVLKAALELGVFDTLYAAASRTDSFLSPYEIASKLPTTPRNPEAPVLLDRMLRLLASYSMVKCGKALSGKGERVYRAEPICRFFLKDNIQDIGSLASQVIVNFDSVFLNTWAQLKDVVLEGGDAFGRAHGGMKLFDYMGTDERFSKLFNQTGFTIAVVKKALEVYEGFKGVKVLVDVGGGVGNTLGVVTSKYPNIKGINFDLTCALAQAPSYPGVEHVAGDMFVDVPTGDAMILKRILHDWTDEDCVKILKNCWKSLPENGKVVVIELVTPDEAENGDINANIAFDMDMLMFTQCSGGKERSRAEFEALAAASGFTHCKFVCQAYHCWIIEFCK

SEQ ID NO: 31660 - protein, 346 aa, Arabidopsis thaliana
  misc_feature (1)..(346): Ceres Seq. ID no. 13588391
MAVRLANAAAFPMVLKAALELGVFDTLYAAASRTDSFLSPYEIASKLPTTPRNPEAPVLLDRMLRLLASYSMVKCGKALSGKGERVYRAEPICRFFLKDNIQDIGSLASQVIVNFDSVFLNTWAQLKDVVLEGGDAFGRAHGGMKLFDYMGTDERFSKLFNQTGFTIAVVKKALEVYEGFKGVKVLVDVGGGVGNTLGVVTSKYPNIKGINFDLTCALAQAPSYPGVEHVAGDMFVDVPTGDAMILKRILHDWTDEDCVKILKNCWKSLPENGKVVVIELVTPDEAENGDINANIAFDMDMLMFTQCSGGKERSRAEFEALAAASGFTHCKFVCQAYHCWIIEFCK

SEQ ID NO: 31661 - protein, 334 aa, Arabidopsis thaliana
  misc_feature (1)..(334): Ceres Seq. ID no. 13588392
MVLKAALELGVFDTLYAAASRTDSFLSPYEIASKLPTTPRNPEAPVLLDRMLRLLASYSMVKCGKALSGKGERVYRAEPICRFFLKDNIQDIGSLASQVIVNFDSVFLNTWAQLKDVVLEGGDAFGRAHGGMKLFDYMGTDERFSKLFNQTGFTIAVVKKALEVYEGFKGVKVLVDVGGGVGNTLGVVTSKYPNIKGINFDLTCALAQAPSYPGVEHVAGDMFVDVPTGDAMILKRILHDWTDEDCVKILKNCWKSLPENGKVVVIELVTPDEAENGDINANIAFDMDMLMFTQCSGGKERSRAEFEALAAASGFTHCKFVCQAYHCWIIEFCK

SEQ ID NO: 31662 - DNA, 1259 bp, Arabidopsis thaliana
  misc_feature (1)..(1259): Ceres Seq. ID no. 13588405
atgatgatagcaaggtgttctctttttccgccgccgtgtttctccgccgtgaggattagatgtttcgccggagaaacttcagatactgggattctattccgggagaagcttatttaccttcaagaccttaacgtagatcctcacaaagctctccgagtaaacccatctctccgttctgctccaatctcctccgtcgtctccgtcgagactctactctcttccaccggactctcaagacccgccgttggtcgtatcctcgacatgtttccagatttgttaacttctgatcctgaatctgaaatcttaccagttcttcgcttcttatccaatgagatttcaatttcagagcaagacatacctaaatcgatctctcgttgtcctcgattgctaatttcatctgtagattatcagcttcgtcctgcattaacgttcctcaaaaccctaggattcgtgggtcgcgacacgattacgtcacggaacacggtgttgcttgtatcgaatgtggaacgaaccctaatccccaaaattgagtatcttgaagaagggttagggtttacaagagaagaagtagcgaagatggttgtgagatctccggcgttgttgacttatagtgttgataacaatttagttcctaaagttgagttttttattgaggagatgcgtggagatgttaaggagctgaaacgtttccctcagtatttttcgtttagcttggagaggaagataaagccaaggcatagattgcttaaggaacatgggattttgatgcctttgtctgagatgttgaaggttagtgatggtcagtttaaccattggcttttagaacttcgtcttaggtctgctgaaagaagatgatgataaacaacaacgttctttttgatgttctttttacttgagatttgggacatgtcaagacacttcacatgagttttgtatatagtttctgtttcaatgattaggctgagtacatgtttcgttagatcatgtaatgtgtaacttgagatcgtgaaagaagatgatgatcaacaacaacaatgtaagctttttgatgttctttgttcttggtacttgagatttgagagatgaaaattgcagaagttttgtactttgggacatgctaagacactttcatatgagcttgtatatagttttttgtttcaatatgttagatcatgaaggtgtaattaagaatctagttttttttttttggtaaggtaattaagaatctagttgatgaggaatgaaagttgctttaaggt

SEQ ID NO: 31663 - protein, 284 aa, Arabidopsis thaliana
  misc_feature (1)..(284): Ceres Seq. ID no. 13588406
MMIARCSLFPPPCFSAVRIRCFAGETSDTGILFREKLIYLQDLNVDPHKALRVNPSLRSAPISSVVSVETLLSSTGLSRPAVGRILDMFPDLLTSDPESEILPVLRFLSNEISISEQDIPKSISRCPRLLISSVDYQLRPALTFLKTLGFVGRDTITSRNTVLLVSNVERTLIPKIEYLEEGLGFTREEVAKMVVRSPALLTYSVDNNLVPKVEFFIEEMRGDVKELKRFPQYFSFSLERKIKPRHRLLKEHGILMPLSEMLKVSDGQFNHWLLELRLRSAERR

SEQ ID NO: 31664 - protein, 283 aa, Arabidopsis thaliana
  misc_feature (1)..(283): Ceres Seq. ID no. 13588407
MIARCSLFPPPCFSAVRIRCFAGETSDTGILFREKLIYLQDLNVDPHKALRVNPSLRSAPISSVVSVETLLSSTGLSRPAVGRILDMFPDLLTSDPESEILPVLRFLSNEISISEQDIPKSISRCPRLLISSVDYQLRPALTFLKTLGFVGRDTITSRNTVLLVSNVERTLIPKIEYLEEGLGFTREEVAKMVVRSPALLTYSVDNNLVPKVEFFIEEMRGDVKELKRFPQYFSFSLERKIKPRHRLLKEHGILMPLSEMLKVSDGQFNHWLLELRLRSAERR

SEQ ID NO: 31665 - protein, 197 aa, Arabidopsis thaliana
  misc_feature (1)..(197): Ceres Seq. ID no. 13588408
MFPDLLTSDPESEILPVLRFLSNEISISEQDIPKSISRCPRLLISSVDYQLRPALTFLKTLGFVGRDTITSRNTVLLVSNVERTLIPKIEYLEEGLGFTREEVAKMVVRSPALLTYSVDNNLVPKVEFFIEEMRGDVKELKRFPQYFSFSLERKIKPRHRLLKEHGILMPLSEMLKVSDGQFNHWLLELRLRSAERR

SEQ ID NO: 31666 - DNA, 1422 bp, Arabidopsis thaliana
  misc_feature (1)..(1422): Ceres Seq. ID no. 13588409
aaaacccaaaaccaaacaatccaaacaaaaaacaaagctgcaagctttttgctctctctctctgctttcatggcgtcttttactaacctctctcttctcctcctctttctcttcaccgctacactcatcaccagccaacaaagcgacgacgacgaaaatgcgtcaccacaactcgctctagacccgtcggagcaagaagcggtctaccgagttctcgactcagtcaactcagccatctcatggcgaaccatcttccccgacgacatctgcgcttcaccacctgacggcgtcgtttgcgataacctctacgcttctcaaaacggcgtcgcaacgtctgttcacgtcacggagttccatttaggctacctctcggattacactcaaaaccctccttgctcttctaatgccacgcttgatcctctcctctttactgctttcaaacaccttcgtaagcttttcttctacaaatgcttcaccgacgctcgtgcctcgttgccgttaacagtcccggaggatttcggctctgttctcgaagagttggtgttcatcgaaaacccatctctcgtcggcgagatcggagccatgatcggtaatttcacaaagctgagaagattagttcttaccggtaacgggtttcacgggtcaattccgggtcaaatcggcgatttggtgagtctagaggagattacactctccagaaacagcttgaccggtgggtttccggcgaacgcaacgtctcgtctgaagaatctaaaagttctagactttagccataactttatcaacggaaacgcccctgattccatcggagacttgacagagcttctcaagctagacctcagcttcaatgagttcaccggagaggtcccttccggcgtcggaaatttgaaaaagctcgtatttttagacttgagttacaaccgtttcgggaatttcggcgttcctctgtttctagcggagatgtccagtttgagagaggttcatctgagtgggaacaagctcggtggtcgtataccggcgatttggaagaatctcgagggtatttcggggattggattctcaaggatgggtcttgaaggaaacatcccagcttcaatgggttcgagtcttaaaaatctctgctttctagctcttgacaacaacaatctcgacggacaaatcccggaggagtttgggtttctggactctgctcgtgaaatcaatctagagaacaataacctcaccggaaaagctccattctccgacagtttcagagatagaatcgggaaaaagctcaaactgagcgggaatgtaaatctccaagtcaagaattccgatcctcatctcgccggaagagctctatattcatcggcgagaaaggttttacctttgatttacttcccggcgactttattggctctttacatttcaataacacagtga

SEQ ID NO: 31667 - protein, 473 aa, Arabidopsis thaliana
  misc_feature (1)..(473): Ceres Seq. ID no. 13588410
KTQNQTIQTKNKAASFLLSLSAFMASFTNLSLLLLFLFTATLITSQQSDDDENASPQLALDPSEQEAVYRVLDSVNSAISWRTIFPDDICASPPDGVVCDNLYASQNGVATSVHVTEFHLGYLSDYTQNPPCSSNATLDPLLFTAFKHLRKLFFYKCFTDARASLPLTVPEDFGSVLEELVFIENPSLVGEIGAMIGNFTKLRRLVLTGNGFHGSIPGQIGDLVSLEEITLSRNSLTGGFPANATSRLKNLKVLDFSHNFINGNAPDSIGDLTELLKLDLSFNEFTGEVPSGVGNLKKLVFLDLSYNRFGNFGVPLFLAEMSSLREVHLSGNKLGGRIPAIWKNLEGISGIGFSRMGLEGNIPASMGSSLKNLCFLALDNNNLDGQIPEEFGFLDSAREINLENNNLTGKAPFSDSFRDRIGKKLKLSGNVNLQVKNSDPHLAGRALYSSARKVLPLIYFPATLLALYISITQ

SEQ ID NO: 31668 - protein, 450 aa, Arabidopsis thaliana
  misc_feature (1)..(450): Ceres Seq. ID no. 13588411
MASFTNLSLLLLFLFTATLITSQQSDDDENASPQLALDPSEQEAVYRVLDSVNSAISWRTIFPDDICASPPDGVVCDNLYASQNGVATSVHVTEFHLGYLSDYTQNPPCSSNATLDPLLFTAFKHLRKLFFYKCFTDARASLPLTVPEDFGSVLEELVFIENPSLVGEIGAMIGNFTKLRRLVLTGNGFHGSIPGQIGDLVSLEEITLSRNSLTGGFPANATSRLKNLKVLDFSHNFINGNAPDSIGDLTELLKLDLSFNEFTGEVPSGVGNLKKLVFLDLSYNRFGNFGVPLFLAEMSSLREVHLSGNKLGGRIPAIWKNLEGISGIGFSRMGLEGNIPASMGSSLKNLCFLALDNNNLDGQIPEEFGFLDSAREINLENNNLTGKAPFSDSFRDRIGKKLKLSGNVNLQVKNSDPHLAGRALYSSARKVLPLIYFPATLLALYISITQ

SEQ ID NO: 31669 - protein, 279 aa, Arabidopsis thaliana
  misc_feature (1)..(279): Ceres Seq. ID no. 13588412
MIGNFTKLRRLVLTGNGFHGSIPGQIGDLVSLEEITLSRNSLTGGFPANATSRLKNLKVLDFSHNFINGNAPDSIGDLTELLKLDLSFNEFTGEVPSGVGNLKKLVFLDLSYNRFGNFGVPLFLAEMSSLREVHLSGNKLGGRIPAIWKNLEGISGIGFSRMGLEGNIPASMGSSLKNLCFLALDNNNLDGQIPEEFGFLDSAREINLENNNLTGKAPFSDSFRDRIGKKLKLSGNVNLQVKNSDPHLAGRALYSSARKVLPLIYFPATLLALYISITQ

SEQ ID NO: 31670 - DNA, 1237 bp, Arabidopsis thaliana
  misc_feature (1)..(1237): Ceres Seq. ID no. 13588421
gagctcataacagaaagaagaaacacaaagtgagacagaactctctaattagtcccgaaggtttcaaaagggtattttggtaaaatcgaaagagaatcatggacgcttttgatgcgattccagatcctgtggtcatcgacattttgaacagagtcggtgacgtcaaaacgttaatacgatgtcgttccgtttctaaacgattcaactcgttagccactcagtctgagtcgctccttctccaactcgatcagatcctcggagccaccgaatctgactccgagatcgattctcctatcgctagcttcttccgatctctcttcaaatccattcacggtctccttcctcctatcttctccaaaccagctaactctgacgaaatcctaacccgatctccgaaaactccggctcagattctctccggatttgaacggatccggaatctggaggtggaattatacggtggtgatgtcaagcttgagaaaggcgccgccgttaagtggaaggctgagttcgggaaaactctcaagagctgcgtcatcgtcgctttccgttccgcgacggttaatacttcagcagctacggaagctgccgccgtcgtcgacggtgttgttgagtcagattcggagtttgtttgtggattgaagacgcgcgtggtgtggacgatcagcgcgttgatggcggcttccacgcgtcattacttgatgagagatttggtgaaagatcacaaggagatggagaaattgattgtgcgtgacagtgatggtgaaggtacggtggtgatggacgcggcggggatgaaagaatacagagagacggaggtgcgtggggataataaagaatcagagcgcgtgggggaacgaactgtggtacctagcgtgaggatgagtatgagacacgcgccgtcgctgatgctgaagagcgggatttgtctcgaagcagcgacgctggtggtcgtaaggccgactggtgtggcttccgatgataacgatgttgagctggtgacggaggcgttcgccggagatggcgacgattgtatgtacggagaagctgttacggcgttgcttaagcgtaggagaaatgtgttagagatgaattctttctaaggcctagtgggctttttttgggcttccgtttgtttggccctttttaatgtatatacatacgcatcgtacaaagccaactgtactattggcgtacgacttttgggtcaaatgacatcaaatccgaattattcctc

SEQ ID NO: 31671 - protein, 334 aa, Arabidopsis thaliana
  misc_feature (1)..(334): Ceres Seq. ID no. 13588422
MDAFDAIPDPVVIDILNRVGDVKTLIRCRSVSKRFNSLATQSESLLLQLDQILGATESDSEIDSPIASFFRSLFKSIHGLLPPIFSKPANSDEILTRSPKTPAQILSGFERIRNLEVELYGGDVKLEKGAAVKWKAEFGKTLKSCVIVAFRSATVNTSAATEAAAVVDGVVESDSEFVCGLKTRVVWTISALMAASTRHYLMRDLVKDHKEMEKLIVRDSDGEGTVVMDAAGMKEYRETEVRGDNKESERVGERTVVPSVRMSMRHAPSLMLKSGICLEAATLVVVRPTGVASDDNDVELVTEAFAGDGDDCMYGEAVTALLKRRRNVLEMNSF

SEQ ID NO: 31672 - DNA, 1532 bp, Arabidopsis thaliana
  misc_feature (1)..(1532): Ceres Seq. ID no. 13588431
gaacacgtcaagatatggcagtgttcttcatcttggtcttggtctttttcttccttgtcttcagattcatctacagtaatatatgggttccgtggagaatccaatctcacttcaagaagcagagcgtgacgggtcctagttaccggatattcagtggaaactccggcgaggttagccggctaacggcaaaggcgaagtcaaagccgattccttccgggagaaatcctcatgagttcgtccaccgtgtggcgcctcactaccacgaatggtcacgtgtctacgggaagacgttcctctactggttcgggtcgaaacctgtggtggctacgtcggatccaagactaatccgggaagctttgacgacgggtgggtcgtttgaccgaattgggcataaccctttgtctaagctgctttatgctcaaggtcttcctggtcttagaggtgatcaatgggctttccatagaagaatcgccaaacaagcttttacaatggagaaactcaagaggtgggtgccacaaatggtaacaagtactatgatgttgatggagaagtgggaagatatgagaaacggaggagaagagattgagttagaggtacacaaagagatgcacaatttgtctgcagaaatgttatcaagaacagcttttgggaacagcgtggaagaagggaaaggaatctttgaattgcaggagcgtatgatgcgtcttttttatctggttcgatggagcgtttatatcccaggattcagattctttccttcgaagacgaatagagagatatggagaattgagaagcaaatccgtgtttctatcttgaaactgatcgaaaacaataaaacagctgttgagaaatcaggaactctgcttcaggcttttatgtctccttacacaaatcagaatggtcaagaagagaagcttgggatagaagaagttacagatgaatgcaaaacgttctactttgcagctaaggaaacaactgctaaccttatgacgtttgttttagtcctcttagctatgaaccaagaatggcaaaacattgctcgggaagaagtcatatgcgttctcggacaaaccgggcttcctactctagacatcttacaagacctcaagactctaagtatgataatcaatgagactctccggctctaccctccagcaatgacattaaaccgtgacactcttaaaagagctaagctaggagaccttgacatccctgcaggaactcaactctatttatcagtagtcgcgatgcaccacgataaagaaacatggggagacgacgcagaggagtttaatccgcgtaggtttgaagatcctaagaaacaatcagctctgcttgtaccgtttgggttagggcctaggacttgtgtgggacagaatcttgctgtgaatgaggctaaaactgttctggctacgatcttgaagtattacagtttcaggttgtctccaagttatgctcatgctcctgttttatttgtgacgttgcagcctcaaaatggtgctcatcttctctttactaggatatcaagttaa

SEQ ID NO: 31673 - protein, 509 aa, Arabidopsis thaliana
  misc_feature (1)..(509): Ceres Seq. ID no. 13588432
TRQDMAVFFILVLVFFFLVFRFIYSNIWVPWRIQSHFKKQSVTGPSYRIFSGNSGEVSRLTAKAKSKPIPSGRNPHEFVHRVAPHYHEWSRVYGKTFLYWFGSKPVVATSDPRLIREALTTGGSFDRIGHNPLSKLLYAQGLPGLRGDQWAFHRRIAKQAFTMEKLKRWVPQMVTSTMMLMEKWEDMRNGGEEIELEVHKEMHNLSAEMLSRTAFGNSVEEGKGIFELQERMMRLFYLVRWSVYIPGFRFFPSKTNREIWRIEKQIRVSILKLIENNKTAVEKSGTLLQAFMSPYTNQNGQEEKLGIEEVTDECKTFYFAAKETTANLMTFVLVLLAMNQEWQNIAREEVICVLGQTGLPTLDILQDLKTLSMIINETLRLYPPAMTLNRDTLKRAKLGDLDIPAGTQLYLSVVAMHHDKETWGDDAEEFNPRRFEDPKKQSALLVPFGLGPRTCVGQNLAVNEAKTVLATILKYYSFRLSPSYAHAPVLFVTLQPQNGAHLLFTRISS

SEQ ID NO: 31674 - protein, 505 aa, Arabidopsis thaliana
  misc_feature (1)..(505): Ceres Seq. ID no. 13588433
MAVFFILVLVFFFLVFRFIYSNIWVPWRIQSHFKKQSVTGPSYRIFSGNSGEVSRLTAKAKSKPIPSGRNPHEFVHRVAPHYHEWSRVYGKTFLYWFGSKPVVATSDPRLIREALTTGGSFDRIGHNPLSKLLYAQGLPGLRGDQWAFHRRIAKQAFTMEKLKRWVPQMVTSTMMLMEKWEDMRNGGEEIELEVHKEMHNLSAEMLSRTAFGNSVEEGKGIFELQERMMRLFYLVRWSVYIPGFRFFPSKTNREIWRIEKQIRVSILKLIENNKTAVEKSGTLLQAFMSPYTNQNGQEEKLGIEEVTDECKTFYFAAKETTANLMTFVLVLLAMNQEWQNIAREEVICVLGQTGLPTLDILQDLKTLSMIINETLRLYPPAMTLNRDTLKRAKLGDLDIPAGTQLYLSVVAMHHDKETWGDDAEEFNPRRFEDPKKQSALLVPFGLGPRTCVGQNLAVNEAKTVLATILKYYSFRLSPSYAHAPVLFVTLQPQNGAHLLFTRISS

SEQ ID NO: 31675 - protein, 347 aa, Arabidopsis thaliana
  misc_feature (1)..(347): Ceres Seq. ID no. 13588434
MEKLKRWVPQMVTSTMMLMEKWEDMRNGGEEIELEVHKEMHNLSAEMLSRTAFGNSVEEGKGIFELQERMMRLFYLVRWSVYIPGFRFFPSKTNREIWRIEKQIRVSILKLIENNKTAVEKSGTLLQAFMSPYTNQNGQEEKLGIEEVTDECKTFYFAAKETTANLMTFVLVLLAMNQEWQNIAREEVICVLGQTGLPTLDILQDLKTLSMIINETLRLYPPAMTLNRDTLKRAKLGDLDIPAGTQLYLSVVAMHHDKETWGDDAEEFNPRRFEDPKKQSALLVPFGLGPRTCVGQNLAVNEAKTVLATILKYYSFRLSPSYAHAPVLFVTLQPQNGAHLLFTRISS

SEQ ID NO: 31676 - DNA, 1176 bp, Arabidopsis thaliana
  misc_feature (1)..(1176): Ceres Seq. ID no. 13588445
attagcatgagaaatggcatccattgattctctccaattccattctctctgcaatctccagtcgtcgattggaagagccaagctccagaatccttcaagtttggttattttcagacggagacccgtaaatctgaattgggttcaattcgaaactaaaggaagtttcgtgtgtaaagcgattggtgattcctcgactccagatgaagatattcagaacactcaaagtgatgataatgttgttgttgttactgctacgactcagagtgacattccccatgattccgagtattcaatttcgaggtttcgaagtatggttaccacactccctcctgttgtcttcctgatgaagaagtgctcagtgaacagcatttggattggggtctgcatcacggctactgttttggtcgctgcgattagggcttatgtagtcagaaagtcaagagataatcagcgtgctggctctgttgctgatcttgtgagacgtggccagctgaggtctggtgatagaagaggcatctccaaatctcttaactacgaggacccattcaacaacccttttgtgaaacttgataaaggaagctcaacggtagagatgtgcgggaaagtttatcggctagctccagtcacacttacagagaaagaacaaactattcatcagaaaagaaggtcaagagcttaccaatggaagcgaccaacgatttttctcaaagaaggggactcgataccacctgatgttgatcccgatacagtcagatggatcccggccaatcatccgtttgccaccacagttagcgatatcgatcaagaccttgcccagaataatgtctaccagaagcaaggtgttcctttccggattcgagctgagcatgaagctatgcagaaaaagcttgaagctttacaaaatgaggagaaattgaacaatctgagtattgacagtcaaaatgccagagatttccagaggccatacaagttctcagcgaagctcgaaggcgagaatatccagaagaattctcaggagaatcatacaggcaattcatcctctgaggaaacgcacaagtcctgagacgtactaatctaattgtaaatacagttttccctcgagagtcatacttgcgttccaagaaactggagattttctttgtagtagatcacacttacctaaatctatgtttttct

SEQ ID NO: 31677 - protein, 349 aa, Arabidopsis thaliana
  misc_feature (1)..(349): Ceres Seq. ID no. 13588446
MASIDSLQFHSLCNLQSSIGRAKLQNPSSLVIFRRRPVNLNWVQFETKGSFVCKAIGDSSTPDEDIQNTQSDDNVVVVTATTQSDIPHDSEYSISRFRSMVTTLPPVVFLMKKCSVNSIWIGVCITATVLVAAIRAYVVRKSRDNQRAGSVADLVRRGQLRSGDRRGISKSLNYEDPFNNPFVKLDKGSSTVEMCGKVYRLAPVTLTEKEQTIHQKRRSRAYQWKRPTIFLKEGDSIPPDVDPDTVRWIPANHPFATTVSDIDQDLAQNNVYQKQGVPFRIRAEHEAMQKKLEALQNEEKLNNLSIDSQNARDFQRPYKFSAKLEGENIQKNSQENHTGNSSSEETHKS

SEQ ID NO: 31678 - protein, 250 aa, Arabidopsis thaliana
  misc_feature (1)..(250): Ceres Seq. ID no. 13588447
MVTTLPPVVFLMKKCSVNSIWIGVCITATVLVAAIRAYVVRKSRDNQRAGSVADLVRRGQLRSGDRRGISKSLNYEDPFNNPFVKLDKGSSTVEMCGKVYRLAPVTLTEKEQTIHQKRRSRAYQWKRPTIFLKEGDSIPPDVDPDTVRWIPANHPFATTVSDIDQDLAQNNVYQKQGVPFRIRAEHEAMQKKLEALQNEEKLNNLSIDSQNARDFQRPYKFSAKLEGENIQKNSQENHTGNSSSEETHKS

SEQ ID NO: 31679 - protein, 239 aa, Arabidopsis thaliana
  misc_feature (1)..(239): Ceres Seq. ID no. 13588448
MKKCSVNSIWIGVCITATVLVAAIRAYVVRKSRDNQRAGSVADLVRRGQLRSGDRRGISKSLNYEDPFNNPFVKLDKGSSTVEMCGKVYRLAPVTLTEKEQTIHQKRRSRAYQWKRPTIFLKEGDSIPPDVDPDTVRWIPANHPFATTVSDIDQDLAQNNVYQKQGVPFRIRAEHEAMQKKLEALQNEEKLNNLSIDSQNARDFQRPYKFSAKLEGENIQKNSQENHTGNSSSEETHKS

SEQ ID NO: 31680 - DNA, 1534 bp, Arabidopsis thaliana
  misc_feature (1)..(1534): Ceres Seq. ID no. 13588453
gagaaagctacgaaagaaaaaaaaaacaatctagcaacagaagaagcttcgagaagacgatggcgacggagacgaacgagaatctgataaactccttcatcgagatcacttcttcatcaagagaagaagctaatttcttcctcgaaagtcacacttggaatctagacgctgccgtttcaactttcctcgataacgatgccgccgcagccgccgaaccaaaccctaccgggccaccaccaccttcttctactattgccggtgcacaatctccttctcaatctcactctcccgattacactccgtctgaaacctctccctctccttcccgatcacgatctgcttctccgtcttctcgcgctgctccctacggtctccgatcgagaggcggtgctggagagaataaagaaactgagaatccgtcgggaattcggagttctaggagtcgtcaacacgctgggaatatccgtacattcgccgatctgaaccgttctccggctgatggcgagggcagtgattcggatgaagctaatgagtattataccggtggacaaaagagtgggatgatggtacaagatcctaagaaagtgaaagatgttgatgaactttttgaccaagctaggcagtcagctgtagacagacctgttgaaccatcaagatcagcttctacaagcttcactggagctgcgcgtttgttgtctggtgaagctgtttcgtcttctcctcagcaacaacagcaagagcagcctcaaaggattatgcacaccatcactttctggttgaatggtttcactgttaatgatggtccgttaagagggttcagtgaccctgaaaacgcagcctttatgaatagcatctcaaggtcagagtgccccagcgaactcgaaccagcagataagaagatccctgttcatgtcgatctggtcaggcgtggagaaaatttcaccgaaccaccaaagcctaaaaatccattccaaggtgtaggaagaaccctaggagccagcggatctggttcaagttcagcaccacaagcttcatctgccccaatgaacgtagcaccagcaccatcaagagggctagttgtagatccagcagcaccgacaacctctatccagctcagattagcagacggaacacgccttgtctccaggttcaacaaccaccacactgtcagagatgtacgtgggtttatcgacgcttctagacccggtggctccaaagagtaccagttgctaaccatggggttccctcctaaacaattgacagaattggaccaaaccatcgagcaagctggtatagctaatgccgtcgtcatccagaaattctagacttacataactcatcccttcgatttatgtctctctttttttttttttgcttttgtgtttttgaacctgatcgttgactttagtctctaactatctggtcaacgctctagaggctttggattttcgtagatttatcaaactcttttcttcagatttattaataactttagcagtttagcttttgcataatttatttatttcttcaatcg

SEQ ID NO: 31681 - protein, 440 aa, Arabidopsis thaliana
  misc_feature (1)..(440): Ceres Seq. ID no. 13588454
ESYERKKKQSSNRRSFEKTMATETNENLINSFIEITSSSREEANFFLESHTWNLDAAVSTFLDNDAAAAAEPNPTGPPPPSSTIAGAQSPSQSHSPDYTPSETSPSPSRSRSASPSSRAAPYGLRSRGGAGENKETENPSGIRSSRSRQHAGNIRTFADLNRSPADGEGSDSDEANEYYTGGQKSGMMVQDPKKVKDVDELFDQARQSAVDRPVEPSRSASTSFTGAARLLSGEAVSSSPQQQQQEQPQRIMHTITFWLNGFTVNDGPLRGFSDPENAAFMNSISRSECPSELEPADKKIPVHVDLVRRGENFTEPPKPKNPFQGVGRTLGASGSGSSSAPQASSAPMNVAPAPSRGLVVDPAAPTTSIQLRLADGTRLVSRFNNHHTVRDVRGFIDASRPGGSKEYQLLTMGFPPKQLTELDQTIEQAGIANAVVIQKF

SEQ ID NO: 31682 - protein, 421 aa, Arabidopsis thaliana
  misc_feature (1)..(421): Ceres Seq. ID no. 13588455
MATETNENLINSFIEITSSSREEANFFLESHTWNLDAAVSTFLDNDAAAAAEPNPTGPPPPSSTIAGAQSPSQSHSPDYTPSETSPSPSRSRSASPSSRAAPYGLRSRGGAGENKETENPSGIRSSRSRQHAGNIRTFADLNRSPADGEGSDSDEANEYYTGGQKSGMMVQDPKKVKDVDELFDQARQSAVDRPVEPSRSASTSFTGAARLLSGEAVSSSPQQQQQEQPQRIMHTITFWLNGFTVNDGPLRGFSDPENAAFMNSISRSECPSELEPADKKIPVHVDLVRRGENFTEPPKPKNPFQGVGRTLGASGSGSSSAPQASSAPMNVAPAPSRGLVVDPAAPTTSIQLRLADGTRLVSRFNNHHTVRDVRGFIDASRPGGSKEYQLLTMGFPPKQLTELDQTIEQAGIANAVVIQKF

SEQ ID NO: 31683 - protein, 254 aa, Arabidopsis thaliana
  misc_feature (1)..(254): Ceres Seq. ID no. 13588456
MMVQDPKKVKDVDELFDQARQSAVDRPVEPSRSASTSFTGAARLLSGEAVSSSPQQQQQEQPQRIMHTITFWLNGFTVNDGPLRGFSDPENAAFMNSISRSECPSELEPADKKIPVHVDLVRRGENFTEPPKPKNPFQGVGRTLGASGSGSSSAPQASSAPMNVAPAPSRGLVVDPAAPTTSIQLRLADGTRLVSRFNNHHTVRDVRGFIDASRPGGSKEYQLLTMGFPPKQLTELDQTIEQAGIANAVVIQKF

SEQ ID NO: 31684 - DNA, 1287 bp, Arabidopsis thaliana
  misc_feature (1)..(1287): Ceres Seq. ID no. 13588473
atggctgcttgcgctactcactcctctctcatgctagcatacgccgccgcatccactcgttcccaggaccttacccctactccatctcttttctcttttgccagctccagacccaaccacttgagcttcccgcttcttctccttgggggttccagggaccggagatgtgctgctattgacagagcttccaaccacaagtttattgtctccgccgtggccgctgaggctgacctcgacacggaggaggacctggagcagaccgccaccgccgtccttgatccgcccaagcctaagaaaggaaaagccgctttggttctcaagagagatagaacaaggtctaagaggtttttggaaatccaaaagctaagggaaaccaaaaaggagtatgatgtcaacactgctatctctttgcttaaacaaactgccaacacaaggtttgttgagtctgttgaagcccatttccgtctcaacatcgatcctaagtacaatgaccagcagctgcgtgcaacggtgagcctgcctaagggaactggccagactgttatagtcgctgttcttgcacaaggtgagaaggttgatgaagccaaaagtgcaggggcagatattgtgggcagtgatgatttaatcgaacagattaaaggaggcttcatggagtttgacaagctgattgcatccccggatatgatggtcaaggttgctggcctgggaaagattcttggaccacgggggctcatgccaaatcccaaggctggtacagtcacagcgaacattccccaggctattgaagagttcaagaaggggaaagttgaattcagagcagacaaaactgggattgttcacattccatttgggaaagttaattttacagaggaagaccttctcataaacttccttgcagcagtgaaatcggtggagacaaacaagccaaagggagctaaaggagtgtactggaaaagcgctcacatatgctcgtcaatggggccttccatcaagttgaacataagagagatgatagacttcaagcctcccactgcgaactaatcgacaacgccatttgtaaatggggtccttttgggagacgggcaatgccagtgtagacagagaagagaaacaccaagtctagtctgttagtaatcttttcacgcctcactgctttgtatcactttgatggccatttgcttcttgtcgttatttatttactattgcctattaaaatttggcaaggggctgtacatgtcaggacgcagaactctttagtactctctaaaagaaaagaccttacattga

SEQ ID NO: 31685 - protein, 346 aa, Arabidopsis thaliana
  misc_feature (1)..(346): Ceres Seq. ID no. 13588474
MAACATHSSLMLAYAAASTRSQDLTPTPSLFSFASSRPNHLSFPLLLLGGSRDRRCAAIDRASNHKFIVSAVAAEADLDTEEDLEQTATAVLDPPKPKKGKAALVLKRDRTRSKRFLEIQKLRETKKEYDVNTAISLLKQTANTRFVESVEAHFRLNIDPKYNDQQLRATVSLPKGTGQTVIVAVLAQGEKVDEAKSAGADIVGSDDLIEQIKGGFMEFDKLIASPDMMVKVAGLGKILGPRGLMPNPKAGTVTANIPQAIEEFKKGKVEFRADKTGIVHIPFGKVNFTEEDLLINFLAAVKSVETNKPKGAKGVYWKSAHICSSMGPSIKLNIREMIDFKPPTAN

SEQ ID NO: 31686 - protein, 336 aa, Arabidopsis thaliana
  misc_feature (1)..(336): Ceres Seq. ID no. 13588475
MLAYAAASTRSQDLTPTPSLFSFASSRPNHLSFPLLLLGGSRDRRCAAIDRASNHKFIVSAVAAEADLDTEEDLEQTATAVLDPPKPKKGKAALVLKRDRTRSKRFLEIQKLRETKKEYDVNTAISLLKQTANTRFVESVEAHFRLNIDPKYNDQQLRATVSLPKGTGQTVIVAVLAQGEKVDEAKSAGADIVGSDDLIEQIKGGFMEFDKLIASPDMMVKVAGLGKILGPRGLMPNPKAGTVTANIPQAIEEFKKGKVEFRADKTGIVHIPFGKVNFTEEDLLINFLAAVKSVETNKPKGAKGVYWKSAHICSSMGPSIKLNIREMIDFKPPTAN

SEQ ID NO: 31687 - DNA, 1064 bp, Arabidopsis thaliana
  misc_feature (1)..(1064): Ceres Seq. ID no. 13588510
ggagatatttcacatccttttctctcttatttgtttctgagattctcttcttgttgttgtagccatggacaacgaaggcataggtctttacccgcttcatcgttgcaaaaccattcacctggtgagacatgctcaagggattcataatgtggctggtgaaaaagatcacagtgcttactcttcggaggattactttgatgctcatcttacccctcttggttggcaacaggttgataatctaaggaaccatgttcgtgcagctcaactcttaaacaaggttgaacttgtcattgtttcccctatgcttagaactatacaaacagctgttggtgcttttggaggagaagaagatactaatggagcggatgcaacaccgttaatggtggctaatgctgggagcagcgatcgtcctgcgatttctagcttaaatagtcctcctttccttgctgttgagctttgcagggaaactatgggtgatcatccttgtgacaggcgaagaagcgtcactgagtacaaggctctctttcccgctattgatttctcaattattgaaaccgacaatgatgttctgtggaagccgagtccaagagagagccttgaagaagttgcagccagaggtgtagagttcatcaaatggatatggacaaggaaagagaaggagatcgcaattgtatctcacagtggcttcttgcacggtctcttgagttctttcgggaaggattgttgcgatgacctaaagaaagagttgtctatacatttgagcaactgtgagcttcgctcaatggttatcgtggatcgagggaacctggggactgactctgcagagaccacaaactatcctgggaaggttcctgaaggacttgataatcctagtggctaaatggctgaagagtaagagagagaattctgagatagtttttctttctaaaataaataaattacatgatgtttccattggactagaatctggcattttcagttatttgatgaacattagtgttggtatgtagccatgtaggttgactctgctgctacatgaatttattgtatgattgttattatcc

SEQ ID NO: 31688 - protein, 271 aa, Arabidopsis thaliana
  misc_feature (1)..(271): Ceres Seq. ID no. 13588511
MDNEGIGLYPLHRCKTIHLVRHAQGIHNVAGEKDHSAYSSEDYFDAHLTPLGWQQVDNLRNHVRAAQLLNKVELVIVSPMLRTIQTAVGAFGGEEDTNGADATPLMVANAGSSDRPAISSLNSPPFLAVELCRETMGDHPCDRRRSVTEYKALFPAIDFSIIETDNDVLWKPSPRESLEEVAARGVEFIKWIWTRKEKEIAIVSHSGFLHGLLSSFGKDCCDDLKKELSIHLSNCELRSMVIVDRGNLGTDSAETTNYPGKVPEGLDNPSG

SEQ ID NO: 31689 - protein, 192 aa, Arabidopsis thaliana
  misc_feature (1)..(192): Ceres Seq. ID no. 13588512
MLRTIQTAVGAFGGEEDTNGADATPLMVANAGSSDRPAISSLNSPPFLAVELCRETMGDHPCDRRRSVTEYKALFPAIDFSIIETDNDVLWKPSPRESLEEVAARGVEFIKWIWTRKEKEIAIVSHSGFLHGLLSSFGKDCCDDLKKELSIHLSNCELRSMVIVDRGNLGTDSAETTNYPGKVPEGLDNPSG

SEQ ID NO: 31690 - protein, 166 aa, Arabidopsis thaliana
  misc_feature (1)..(166): Ceres Seq. ID no. 13588513
MVANAGSSDRPAISSLNSPPFLAVELCRETMGDHPCDRRRSVTEYKALFPAIDFSIIETDNDVLWKPSPRESLEEVAARGVEFIKWIWTRKEKEIAIVSHSGFLHGLLSSFGKDCCDDLKKELSIHLSNCELRSMVIVDRGNLGTDSAETTNYPGKVPEGLDNPSG

SEQ ID NO: 31691 - DNA, 894 bp, Arabidopsis thaliana
  misc_feature (1)..(894): Ceres Seq. ID no. 13588533
gaaaaataccaaattcttgaaaacaaaaaaaaaaatgaataatcaaaatgaagacacagaaggtggtcgaaactgttgtacttgctgcttaagcttcatcttcacagctggtctcacctctcttttcttatggcttagtctccgtgcggacaaacccaaatgctcaatccaaaactttttcattcctgccctcggaaaagacccaaattcacgagacaataccactctaaatttcatggttcgttgtgacaatccaaatagagaccaaggaatctactacgacgatgtccaccttaatttttccaccatcaacacgaccaagatcaattcatctgctcttgtcttagttggtaactacacagtgcctaagttctatcaaggacacaagaagaaggccaagaagtggggtcaagtaaagccgctaaacaaccagacggttttacgagcggttttgcctaatggatcggctgttttcaggttggatctcaagactcaagttagattcaagattgttttttggaaaactaagaggtatggggttgaagttggagctgatgttgaagtcaacggtgatggagttaaagctcagaagaaaggaattaagatgaagaaatctgattcttcttttccattaagaagctcttttccgattagtgttttgatgaatttactcgtattctttgctattcgttaacttcattaatggtgttgattttcaggtttttcatttcttggttttgttgattttgattattgactatttcatgagttttgttgtgatccttagttccattttcttcattgcataatttatcccttattttttttgttttaactatgtattagtttccatcaacaaaattctatttgaaaatcattttatccattttttat

SEQ ID NO: 31692 - protein, 230 aa, Arabidopsis thaliana
  misc_feature (1)..(230): Ceres Seq. ID no. 13588534
KNTKFLKTKKKMNNQNEDTEGGRNCCTCCLSFIFTAGLTSLFLWLSLRADKPKCSIQNFFIPALGKDPNSRDNTTLNFMVRCDNPNRDQGIYYDDVHLNFSTINTTKINSSALVLVGNYTVPKFYQGHKKKAKKWGQVKPLNNQTVLRAVLPNGSAVFRLDLKTQVRFKIVFWKTKRYGVEVGADVEVNGDGVKAQKKGIKMKKSDSSFPLRSSFPISVLMNLLVFFAIR

SEQ ID NO: 31693 - protein, 219 aa, Arabidopsis thaliana
  misc_feature (1)..(219): Ceres Seq. ID no. 13588535
MNNQNEDTEGGRNCCTCCLSFIFTAGLTSLFLWLSLRADKPKCSIQNFFIPALGKDPNSRDNTTLNFMVRCDNPNRDQGIYYDDVHLNFSTINTTKINSSALVLVGNYTVPKFYQGHKKKAKKWGQVKPLNNQTVLRAVLPNGSAVFRLDLKTQVRFKIVFWKTKRYGVEVGADVEVNGDGVKAQKKGIKMKKSDSSFPLRSSFPISVLMNLLVFFAIR

SEQ ID NO: 31694 - protein, 152 aa, Arabidopsis thaliana
  misc_feature (1)..(152): Ceres Seq. ID no. 13588536
MVRCDNPNRDQGIYYDDVHLNFSTINTTKINSSALVLVGNYTVPKFYQGHKKKAKKWGQVKPLNNQTVLRAVLPNGSAVFRLDLKTQVRFKIVFWKTKRYGVEVGADVEVNGDGVKAQKKGIKMKKSDSSFPLRSSFPISVLMNLLVFFAIR

SEQ ID NO: 31695 - DNA, 2298 bp, Arabidopsis thaliana
  misc_feature (1)..(2298): Ceres Seq. ID no. 13588537
gttctctacaacgaactttaaagtaacaaagtacacagaaaggtttttacttcttccttgcttgttgtgtgtattctcattcacatacaattgtttttttgtaactatggagaatactataacgagctctacctcctcaccgaagggccggggagtaaatttctcgaccccgagaggctttggttcaaaatttaagtcaaaatgtaaagaaaccttctttcccgatgatccattcaaaccgatatcgcaagagccaaaccgtttgctaaaaacaaagaagttattggagtattttgtgccaatctttgagtggctcccaaagtatgatatgcaaaaactaaagtatgatgtgctcgccggaatcaccatcaccagtcttgctgttcctcagggcatcagctatgctaagctcgccagtatccctcccatcataggcctatattcaagttttgtgccgccttttgtgtatgccgtgttcggaagttcgaacaatctggcagtgggaacagtcgcagcatgctctttgctgatcgctgagacattcggtgaggagatgataaaaaatgagcctgaactctaccttcatttgatcttcaccgccactctcatcaccggtctattccaatttgctatgggattcttgaggttggggatattggtggatttcttgtcacactcgaccataacgggcttcatgggcggtaccgcaatcatcattctcctacaacagcttaagggcatctttggactagtccattttacgcacaaaaccgatgtcgtatcagttctccactcaatcttagacaaccgggctgagtggaagtggcaaagtaccttggctggtgtctgctttcttgtatttctacaatccactcgatacataaagcaaagatacccaaagctattttgggtatcagcaatgggtccaatggtggtggtcgttgtgggttgcgttgttgcttatttggtgaaaggaacagcacacggcattgctactgttgggcctttaaagaaaggactaaatcctccttctattcaacttttgaactttgactccaagtatctagggatggtgtttaaggccggaatcgtcacaggactcatcgctttggccgaagggatagcaattggaagaagctttgctgtaatgaagaacgaacaaacggacgggaacaaagagatgatagcatttggtcttatgaacgtaattggctccttcacttcttgctatttgacaacggggccattttcaaagacagcagtgaactacaacgcggggacaaagacaccgatgtcgaatgtagtaatgggcgtttgcatgatgcttgtgcttctcttcctagcgcctctattcagctacacaccattagttggtctctcagccatcattatgtcagccatgttgggtctcatcaactacgaggagatgtaccatctcttcaaggttgacaagtttgatttcctcgtctgcatgtccgcctttttcggtgtttcattccttagcatggactacggtctcatcatctccgttggattttctatcgtaagagctttgttgtacgttgcaaggccctccacttgtaaattgggaaggataccaaactcggttatgtttagagacatagaacagtaccctgcctccgaggagatgcttggttatatcattcttcaattaggctctccagtcttttttgccaatagcacttacgtccgtgaacggatcttgaggtggattcgtgatgaacctgaagccatcgagtttcttctccttgatctctctggagtttcaaccattgacatgaccgggatggaaacactactcgaaattcagagaatccttggatcaaaaaacatcaagatggtgataataaatccaagatttgaagtcttggaaaagatgatgttgtcccatttcgtggagaagataggaaaagagtatatgttcttatcgattgacgatgcagttcaagcatgccgatttaatcttaccaccaccaagccggaagtgtgaccttcttcttagttattagtgggaaggttctaataaaatgcgtaatcttttcttttttgtcaatggaagttaaactgcttaacagtggaaccaaaatatagattaagaaagaaaaaaaaaacagaagttaaactgcttatctttgaattatgggaattaaatgtagtggacccaaaatcatgaaatggttttaattagaccactatgattgcttcgtggctatgaaagagttgtaaccgagaaagaaaagcaagaagcgataaatgaaaatttcagtattattgact

SEQ ID NO: 31696 - protein, 669 aa, Arabidopsis thaliana
  misc_feature (1)..(669): Ceres Seq. ID no. 15220887
FSTTNFKVTKYTERFLLLPCLLCVFSFTYNCFFVTMENTITSSTSSPKGRGVNFSTPRGFGSKFKSKCKETFFPDDPFKPISQEPNRLLKTKKLLEYFVPIFEWLPKYDMQKLKYDVLAGITITSLAVPQGISYAKLASIPPIIGLYSSFVPPFVYAVFGSSNNLAVGTVAACSLLIAETFGEEMIKNEPELYLHLIFTATLITGLFQFAMGFLRLGILVDFLSHSTITGFMGGTAIIILLQQLKGIFGLVHFTHKTDVVSVLHSILDNRAEWKWQSTLAGVCFLVFLQSTRYIKQRYPKLFWVSAMGPMVVVVVGCVVAYLVKGTAHGIATVGPLKKGLNPPSIQLLNFDSKYLGMVFKAGIVTGLIALAEGIAIGRSFAVMKNEQTDGNKEMIAFGLMNVIGSFTSCYLTTGPFSKTAVNYNAGTKTPMSNVVMGVCMMLVLLFLAPLFSYTPLVGLSAIIMSAMLGLINYEEMYHLFKVDKFDFLVCMSAFFGVSFLSMDYGLIISVGFSIVRALLYVARPSTCKLGRIPNSVMFRDIEQYPASEEMLGYIILQLGSPVFFANSTYVRERILRWIRDEPEAIEFLLLDLSGVSTIDMTGMETLLEIQRILGSKNIKMVIINPRFEVLEKMMLSHFVEKIGKEYMFLSIDDAVQACRFNLTTTKPEV

SEQ ID NO: 31697 - protein, 634 aa, Arabidopsis thaliana
  misc_feature (1)..(634): Ceres Seq. ID no. 15220888
MENTITSSTSSPKGRGVNFSTPRGFGSKFKSKCKETFFPDDPFKPISQEPNRLLKTKKLLEYFVPIFEWLPKYDMQKLKYDVLAGITITSLAVPQGISYAKLASIPPIIGLYSSFVPPFVYAVFGSSNNLAVGTVAACSLLIAETFGEEMIKNEPELYLHLIFTATLITGLFQFAMGFLRLGILVDFLSHSTITGFMGGTAIIILLQQLKGIFGLVHFTHKTDVVSVLHSILDNRAEWKWQSTLAGVCFLVFLQSTRYIKQRYPKLFWVSAMGPMVVVVVGCVVAYLVKGTAHGIATVGPLKKGLNPPSIQLLNFDSKYLGMVFKAGIVTGLIALAEGIAIGRSFAVMKNEQTDGNKEMIAFGLMNVIGSFTSCYLTTGPFSKTAVNYNAGTKTPMSNVVMGVCMMLVLLFLAPLFSYTPLVGLSAIIMSAMLGLINYEEMYHLFKVDKFDFLVCMSAFFGVSFLSMDYGLIISVGFSIVRALLYVARPSTCKLGRIPNSVMFRDIEQYPASEEMLGYIILQLGSPVFFANSTYVRERILRWIRDEPEAIEFLLLDLSGVSTIDMTGMETLLEIQRILGSKNIKMVIINPRFEVLEKMMLSHFVEKIGKEYMFLSIDDAVQACRFNLTTTKPEV

SEQ ID NO: 31698 - protein, 560 aa, Arabidopsis thaliana
  misc_feature (1)..(560): Ceres Seq. ID no. 15220889
MQKLKYDVLAGITITSLAVPQGISYAKLASIPPIIGLYSSFVPPFVYAVFGSSNNLAVGTVAACSLLIAETFGEEMIKNEPELYLHLIFTATLITGLFQFAMGFLRLGILVDFLSHSTITGFMGGTAIIILLQQLKGIFGLVHFTHKTDVVSVLHSILDNRAEWKWQSTLAGVCFLVFLQSTRYIKQRYPKLFWVSAMGPMVVVVVGCVVAYLVKGTAHGIATVGPLKKGLNPPSIQLLNFDSKYLGMVFKAGIVTGLIALAEGIAIGRSFAVMKNEQTDGNKEMIAFGLMNVIGSFTSCYLTTGPFSKTAVNYNAGTKTPMSNVVMGVCMMLVLLFLAPLFSYTPLVGLSAIIMSAMLGLINYEEMYHLFKVDKFDFLVCMSAFFGVSFLSMDYGLIISVGFSIVRALLYVARPSTCKLGRIPNSVMFRDIEQYPASEEMLGYIILQLGSPVFFANSTYVRERILRWIRDEPEAIEFLLLDLSGVSTIDMTGMETLLEIQRILGSKNIKMVIINPRFEVLEKMMLSHFVEKIGKEYMFLSIDDAVQACRFNLTTTKPEV

SEQ ID NO: 31699 - DNA, 1268 bp, Arabidopsis thaliana
  misc_feature (1)..(1268): Ceres Seq. ID no. 13588538
gtcagaaaaccaaaaaataaataaataaaaaaatagaataataaaaataaaaataataataaatgggttcatatttaggaatttctgcagttcttttcgtaatatctttgctgggattttcagccaatgctgaggtgttcaacgttggtggttctccaggttctgatattactcaggcacttctgaaagcattcacatcagcatgccaagctccgacagcgagcaaggtggtgatcacaaagggtgagttcaagcttggtgagatcgagatgacgggcccatgcaaagctccagtcgagatcaacctccaaggtactctcaaagctgatggaaaagctatccaggggaaggaaagatgggtcgtcttcctaagaattaatggctttaagttaaacggaggtggaatcttcgacggtgaaggcaatgcagcttggagagtcaataactgtcacaagactttcgagtgcaagaaacttcccatcagtataaggtttgatttcgtggagaatgctgagattagagacatatcctcgatagatgctaagaacttccacataaacgttctcggcgccaagaacatgacctttgataacgtcaaggtcatcgctccggcagagagccccaacactgacggtatccatttgggaagaagtgaaggagtcaagatcctcaactctaagatagccaccggagatgactgcatctctgttggggatgggatgaagaacctccacgtcgagaacgttatgtgcggtcctggacacggaatcagtgtcgggagtcttggaaggtacgtgcatgagcaagatgtcacaggcattactgtcgtgaactgcacccttcagggaactgacaatgggctaaggatcaagacatggccatctgcggcttgcgccaccaccgcctctggtattcattttgagaacatcatccttaacaacgttagcaacccaatcctcattgaccaggagtactgcccttggaaccagtgcaacaagcagaaaccatcgacgattaagctggtggacataagcttcaagaatattagaggaacatcagggaacaaggacgcagtgaagctattgtgcagcaaggcgcatccatgtgcgaatgttgagattggaaacattaaccttgagtacaagggagccgatggtccaccgactttcatgtgctcaaacgtttcccctaagcttgtgggaactcagaacccgaaggcttgtagcgccggacccactcccaagacagctgctaagggagacttgtag

SEQ ID NO: 31700 - protein, 401 aa, Arabidopsis thaliana
  misc_feature (1)..(401): Ceres Seq. ID no. 13588539
MGSYLGISAVLFVISLLGFSANAEVFNVGGSPGSDITQALLKAFTSACQAPTASKVVITKGEFKLGEIEMTGPCKAPVEINLQGTLKADGKAIQGKERWVVFLRINGFKLNGGGIFDGEGNAAWRVNNCHKTFECKKLPISIRFDFVENAEIRDISSIDAKNFHINVLGAKNMTFDNVKVIAPAESPNTDGIHLGRSEGVKILNSKIATGDDCISVGDGMKNLHVENVMCGPGHGISVGSLGRYVHEQDVTGITVVNCTLQGTDNGLRIKTWPSAACATTASGIHFENIILNNVSNPILIDQEYCPWNQCNKQKPSTIKLVDISFKNIRGTSGNKDAVKLLCSKAHPCANVEIGNINLEYKGADGPPTFMCSNVSPKLVGTQNPKACSAGPTPKTAAKGDL

SEQ ID NO: 31701 - protein, 332 aa, Arabidopsis thaliana
  misc_feature (1)..(332): Ceres Seq. ID no. 13588540
MTGPCKAPVEINLQGTLKADGKAIQGKERWVVFLRINGFKLNGGGIFDGEGNAAWRVNNCHKTFECKKLPISIRFDFVENAEIRDISSIDAKNFHINVLGAKNMTFDNVKVIAPAESPNTDGIHLGRSEGVKILNSKIATGDDCISVGDGMKNLHVENVMCGPGHGISVGSLGRYVHEQDVTGITVVNCTLQGTDNGLRIKTWPSAACATTASGIHFENIILNNVSNPILIDQEYCPWNQCNKQKPSTIKLVDISFKNIRGTSGNKDAVKLLCSKAHPCANVEIGNINLEYKGADGPPTFMCSNVSPKLVGTQNPKACSAGPTPKTAAKGDL

SEQ ID NO: 31702 - protein, 229 aa, Arabidopsis thaliana
  misc_feature (1)..(229): Ceres Seq. ID no. 13588541
MTFDNVKVIAPAESPNTDGIHLGRSEGVKILNSKIATGDDCISVGDGMKNLHVENVMCGPGHGISVGSLGRYVHEQDVTGITVVNCTLQGTDNGLRIKTWPSAACATTASGIHFENIILNNVSNPILIDQEYCPWNQCNKQKPSTIKLVDISFKNIRGTSGNKDAVKLLCSKAHPCANVEIGNINLEYKGADGPPTFMCSNVSPKLVGTQNPKACSAGPTPKTAAKGDL

SEQ ID NO: 31703 - DNA, 1170 bp, Arabidopsis thaliana
  misc_feature (1)..(1170): Ceres Seq. ID no. 13588546
atgggtgagacgcagaagattttgcaagggccacgtcaccacacatctctgaagaagcccttatgggttgttttgacagtctcagtgaccagcatgcttctaatctgtactcacatgtatccaaaacatggcaagagctcctcgtgtcacggcctctatagcaccagaggctgtgaggatgctctctctaagtggctacctgttcatgtcaggaaattcactgatgaggagatagcagctcgagcagtggttagagacatactaagaacgcctcccttcataaccaataactccaaaatcgctttcttgttcttgactcccggtactttgccatttgagaagctctgggatgaatttttcaagggtcatgaagggaaattctcgatatatatccacccgtcaaaggaacgaccagttcacatcagccgtcacttttctgatcgagagattcacagtgatgaggttacttggggaaggatttctatggttgatgctgagaagcggttactggttagcgctcttgaagatcctgacaaccaacactttgttcttgtttcagagagttgtattccgttgcatacttttgactacacttatagatatttgttgtactccaacgttagcttcattgagagttttgtggatccgggtccacatggaaccggtagacatatggaacacatgttaccagaaatcgccaaggaagattttagaaagggtgctcagtggttcacaatgaagcgacaacacgcgattatagtgatggccgatggtctttactactcaaaattccgcgagtattgtggacctggaatagaggccgacaagaactgcattgccgatgaacattacttgccaacattcttcaatatgattgatcccatggggatctcaaattggtcagtgacgtttgttgattggtctgaacgaaggtggcatccaaagacatacggaggaaacgagatttcattagaatttatgaaaaatgtcacatccgaggacatgagtgtacatgtcaccagtgtggggaagcatggagatgagctgcattggccttgtacatggaacgggattaaacggccttgctatctatttgcaagaaagttccatcctgatactctcgacacattggtcaacctcttcccaaactacacaaacacagctgtctga

SEQ ID NO: 31704 - protein, 389 aa, Arabidopsis thaliana
  misc_feature (1)..(389): Ceres Seq. ID no. 15220890
MGETQKILQGPRHHTSLKKPLWVVLTVSVTSMLLICTHMYPKHGKSSSCHGLYSTRGCEDALSKWLPVHVRKFTDEEIAARAVVRDILRTPPFITNNSKIAFLFLTPGTLPFEKLWDEFFKGHEGKFSIYIHPSKERPVHISRHFSDREIHSDEVTWGRISMVDAEKRLLVSALEDPDNQHFVLVSESCIPLHTFDYTYRYLLYSNVSFIESFVDPGPHGTGRHMEHMLPEIAKEDFRKGAQWFTMKRQHAIIVMADGLYYSKFREYCGPGIEADKNCIADEHYLPTFFNMIDPMGISNWSVTFVDWSERRWHPKTYGGNEISLEFMKNVTSEDMSVHVTSVGKHGDELHWPCTWNGIKRPCYLFARKFHPDTLDTLVNLFPNYTNTAV

SEQ ID NO: 31705 - protein, 358 aa, Arabidopsis thaliana
  misc_feature (1)..(358): Ceres Seq. ID no. 15220891
MLLICTHMYPKHGKSSSCHGLYSTRGCEDALSKWLPVHVRKFTDEEIAARAVVRDILRTPPFITNNSKIAFLFLTPGTLPFEKLWDEFFKGHEGKFSIYIHPSKERPVHISRHFSDREIHSDEVTWGRISMVDAEKRLLVSALEDPDNQHFVLVSESCIPLHTFDYTYRYLLYSNVSFIESFVDPGPHGTGRHMEHMLPEIAKEDFRKGAQWFTMKRQHAIIVMADGLYYSKFREYCGPGIEADKNCIADEHYLPTFFNMIDPMGISNWSVTFVDWSERRWHPKTYGGNEISLEFMKNVTSEDMSVHVTSVGKHGDELHWPCTWNGIKRPCYLFARKFHPDTLDTLVNLFPNYTNTAV

SEQ ID NO: 31706 - protein, 351 aa, Arabidopsis thaliana
  misc_feature (1)..(351): Ceres Seq. ID no. 15220892
MYPKHGKSSSCHGLYSTRGCEDALSKWLPVHVRKFTDEEIAARAVVRDILRTPPFITNNSKIAFLFLTPGTLPFEKLWDEFFKGHEGKFSIYIHPSKERPVHISRHFSDREIHSDEVTWGRISMVDAEKRLLVSALEDPDNQHFVLVSESCIPLHTFDYTYRYLLYSNVSFIESFVDPGPHGTGRHMEHMLPEIAKEDFRKGAQWFTMKRQHAIIVMADGLYYSKFREYCGPGIEADKNCIADEHYLPTFFNMIDPMGISNWSVTFVDWSERRWHPKTYGGNEISLEFMKNVTSEDMSVHVTSVGKHGDELHWPCTWNGIKRPCYLFARKFHPDTLDTLVNLFPNYTNTAV

SEQ ID NO: 31707 - DNA, 2278 bp, Arabidopsis thaliana
  misc_feature (1)..(2278): Ceres Seq. ID no. 13588547
tacttgctccttttacatttcaacgaacaaaacacatgtatacatagaaagaaacgcaaatacgcagatataataaatggcgactggtcgatacatcgttgaggttgagaagggaaagcaaggcgttgatggaggaagtccatcggtcggtccagtgtaccggagtatctatgctaaagacggttttcctgaaccgcctgatgatctcgtcagtgcatgggatattttccgtttatctgtggagaaatctccaaataatcctatgcttggtcgtagagaaatagttgatggaaaagctgggaaatatgtatggcaaacttacaaagaagtacataatgtagtgattaagcttggaaactctatcagaactattggagttggaaaaggagataaatgcggtatttatggcgccaatagtcctgaatggattataagcatggaggcttgcaatgctcatggactctactgtgtacctttatatgacactctaggtgctggagcaatagaattcatcatttgtcatgctgaggtctcacttgcttttgctgaggagaacaagatttctgagttattgaagacagctccaaaatcaactaaatatttgaagtatattgtgagctttggtgaggttacaaataatcagagagtagaagctgagaggcacagattaacaatatattcatgggaccaattcttgaagctaggcgagggtaaacattatgaattaccagagaagaggagaagcgatgtttgcaccataatgtatacaagtggcacaactggtgatcctaaaggagtattgcttacaaatgagagcattattcatctccttgaaggtgttaaaaaattgcttaaaactattgatgaagagttaaccagtaaagatgtatatctctcatatctacctctggctcatatcttcgatcgtgtgattgaggagctgtgtatttatgaagcagcctctatcggattctggcgaggggatgttaagatattgatagaagacattgctgcattgaaaccgactgttttctgcgctgttcctcgcgttctagagagaatatacaccggtcttcagcagaaactttctgatggtggttttgtaaagaagaaattattcaactttgcattcaaatacaaacataaaaacatggagaaagggcagcctcatgaacaagcatctccaatagctgacaaaattgtatttaaaaaggtaaaagaagggttgggaggaaacgtgcgtcttatcctctcaggagcagctcctcttgcagctcacatcgaatctttccttcgagttgtcgcgtgtgctcatgttttgcaaggatacggtctaacagagagttgtggtgggacttttgtgtccattccaaacgagctttcaatgcttggaacggttggtccaccggttccaaacgttgacataaggctagagtcagttccagagatgggttatgacgctcttgcaagcaatccacgtggagagatttgcatcaggggaaagactttgttctctggatactacaaacgtgaagatctcactcaagaagtcttcattgatggatggcttcacactggtgatgtcggtgagtggcaaccagatggagccatgaagatcatcgaccgtaagaagaacatctttaaactgtctcaaggagaatacgttgccgttgagaacttggagaacatatacagtcatgtcgccgccattgaatcgatatgggtatatggaaacagctatgagtcttacttagtggctgtggtatgtccaagcaagatccagatcgagcattgggccaaagaacacaaagtttcaggagactttgagtctatctgccgaaaccaaaagactaaagagtttgtccttggagagttcaacagagtagccaaagacaaaaagctgaagggatttgagctgatcaaaggtgttcatttggacacagtcccgttcgacatggaaagagatctcatcactccttcttacaagatgaaaagacctcagcttctcaagtactatcagaaagagattgatgaaatgtataagaaaaacagagaagtgcagctacgagtgtaaagaaaggaagttgttggacaaatctctcaggtttatatgtttctcttatcactctaattcatattgttatatgtctctatgctgtgttaatatcgaagggtttttttctttctttgcttgtaaacaaccaaatcttttattgttcttaacattctcctgttttatgtatttgtattgatattttaataaagttctctgtccact

SEQ ID NO: 31708 - protein, 665 aa, Arabidopsis thaliana
  misc_feature (1)..(665): Ceres Seq. ID no. 13588548
MATGRYIVEVEKGKQGVDGGSPSVGPVYRSIYAKDGFPEPPDDLVSAWDIFRLSVEKSPNNPMLGRREIVDGKAGKYVWQTYKEVHNVVIKLGNSIRTIGVGKGDKCGIYGANSPEWIISMEACNAHGLYCVPLYDTLGAGAIEFIICHAEVSLAFAEENKISELLKTAPKSTKYLKYIVSFGEVTNNQRVEAERHRLTIYSWDQFLKLGEGKHYELPEKRRSDVCTIMYTSGTTGDPKGVLLTNESIIHLLEGVKKLLKTIDEELTSKDVYLSYLPLAHIFDRVIEELCIYEAASIGFWRGDVKILIEDIAALKPTVFCAVPRVLERIYTGLQQKLSDGGFVKKKLFNFAFKYKHKNMEKGQPHEQASPIADKIVFKKVKEGLGGNVRLILSGAAPLAAHIESFLRVVACAHVLQGYGLTESCGGTFVSIPNELSMLGTVGPPVPNVDIRLESVPEMGYDALASNPRGEICIRGKTLFSGYYKREDLTQEVFIDGWLHTGDVGEWQPDGAMKIIDRKKNIFKLSQGEYVAVENLENIYSHVAAIESIWVYGNSYESYLVAVVCPSKIQIEHWAKEHKVSGDFESICRNQKTKEFVLGEFNRVAKDKKLKGFELIKGVHLDTVPFDMERDLITPSYKMKRPQLLKYYQKEIDEMYKKNREVQLRV

SEQ ID NO: 31709 - protein, 603 aa, Arabidopsis thaliana
  misc_feature (1)..(603): Ceres Seq. ID no. 13588549
MLGRREIVDGKAGKYVWQTYKEVHNVVIKLGNSIRTIGVGKGDKCGIYGANSPEWIISMEACNAHGLYCVPLYDTLGAGAIEFIICHAEVSLAFAEENKISELLKTAPKSTKYLKYIVSFGEVTNNQRVEAERHRLTIYSWDQFLKLGEGKHYELPEKRRSDVCTIMYTSGTTGDPKGVLLTNESIIHLLEGVKKLLKTIDEELTSKDVYLSYLPLAHIFDRVIEELCIYEAASIGFWRGDVKILIEDIAALKPTVFCAVPRVLERIYTGLQQKLSDGGFVKKKLFNFAFKYKHKNMEKGQPHEQASPIADKIVFKKVKEGLGGNVRLILSGAAPLAAHIESFLRVVACAHVLQGYGLTESCGGTFVSIPNELSMLGTVGPPVPNVDIRLESVPEMGYDALASNPRGEICIRGKTLFSGYYKREDLTQEVFIDGWLHTGDVGEWQPDGAMKIIDRKKNIFKLSQGEYVAVENLENIYSHVAAIESIWVYGNSYESYLVAVVCPSKIQIEHWAKEHKVSGDFESICRNQKTKEFVLGEFNRVAKDKKLKGFELIKGVHLDTVPFDMERDLITPSYKMKRPQLLKYYQKEIDEMYKKNREVQLRV

SEQ ID NO: 31710 - protein, 545 aa, Arabidopsis thaliana
  misc_feature (1)..(545): Ceres Seq. ID no. 13588550
MEACNAHGLYCVPLYDTLGAGAIEFIICHAEVSLAFAEENKISELLKTAPKSTKYLKYIVSFGEVTNNQRVEAERHRLTIYSWDQFLKLGEGKHYELPEKRRSDVCTIMYTSGTTGDPKGVLLTNESIIHLLEGVKKLLKTIDEELTSKDVYLSYLPLAHIFDRVIEELCIYEAASIGFWRGDVKILIEDIAALKPTVFCAVPRVLERIYTGLQQKLSDGGFVKKKLFNFAFKYKHKNMEKGQPHEQASPIADKIVFKKVKEGLGGNVRLILSGAAPLAAHIESFLRVVACAHVLQGYGLTESCGGTFVSIPNELSMLGTVGPPVPNVDIRLESVPEMGYDALASNPRGEICIRGKTLFSGYYKREDLTQEVFIDGWLHTGDVGEWQPDGAMKIIDRKKNIFKLSQGEYVAVENLENIYSHVAAIESIWVYGNSYESYLVAVVCPSKIQIEHWAKEHKVSGDFESICRNQKTKEFVLGEFNRVAKDKKLKGFELIKGVHLDTVPFDMERDLITPSYKMKRPQLLKYYQKEIDEMYKKNREVQLRV

SEQ ID NO: 31711 - DNA, 1415 bp, Arabidopsis thaliana
  misc_feature (1)..(1415): Ceres Seq. ID no. 13588571
gaacgacgacgaatcttcgtcttccccttgttcttcttcttcctcttcattttactttctcttcccgatttctctctgtccgattcaccttttcctccgatctcggtctccttagattccggaataatcccctcaaggcttggcttagtaatcgtcgttttctccgccatgagttccaatacggcgtcgtccagcgcgggggcagccggatcgggagattcttccgccgctaggaagaattcaaagcgacccaagtattcgaagttcacacagcaggagcttccagcttgcaagccaattctaacccctggttgggtcatttcgacatttttgatagtcagtgttatctttattccccttggagttatctcccttttcgcttcccaggatgttgtggagatcgttgatcggtatgatactgagtgcattccggcacctgctaggactaacaaggttgcatatattcaaggagatggagataaagtttgtaaccgggatcttaaagtgacaaagcgtatgaagcaacctatctatgtttattaccaacttgagaatttctaccagaatcaccgaaggtatgtaaaaagtcgaagtgattcacagttgagaagtacaaaatacgagaatcaaataagtgcatgcaagcctgaggatgatgttggtgggcagccgattgtgccgtgtggtctaattgcttggagtctttttaacgacacatacgcgttatcaagaaacaatgtaagcctagctgtgaacaaaaaaggcattgcatggaagagtgacaaggaacacaagtttgggaacaaggtcttccccaagaattttcaaaaggggaatatcacaggtggtgctactttagatccaagaataccgcttagtgaacaagaagatctcattgtgtggatgagaaccgcagcattgccaacatttagaaaactttacggaaagatagagtctgacctcgagatgggtgacaccatacacgttaagctgaacaacaactacaacacgtacagcttcaatggaaagaagaagcttgttttgtcaaccactagttggctgggtgggaagaacgatttccttggcattgcttacctgacagttggcgggatctgtttcattttggccctcgcatttaccatcatgtaccttgtgaaacccaggcgtcttggagatccgtcctacttgtcatggaatagaaatcctggaggtcggtaacaagcttggaaagggagagagagagctctaatctgcgtgtgtaaatcttatccatccatgtacacatacaatgtaatttttgcttacatactatgtaatccttgcttgcaaaatggtttcttcggtgagagcttaaatcccacataatactttgttgttgttgttccaaaccagtctaatatattacttttgtcccc

SEQ ID NO: 31712 - protein, 405 aa, Arabidopsis thaliana
  misc_feature (1)..(405): Ceres Seq. ID no. 13588572
ERRRIFVFPLFFFFLFILLSLPDFSLSDSPFPPISVSLDSGIIPSRLGLVIVVFSAMSSNTASSSAGAAGSGDSSAARKNSKRPKYSKFTQQELPACKPILTPGWVISTFLIVSVIFIPLGVISLFASQDVVEIVDRYDTECIPAPARTNKVAYIQGDGDKVCNRDLKVTKRMKQPIYVYYQLENFYQNHRRYVKSRSDSQLRSTKYENQISACKPEDDVGGQPIVPCGLIAWSLFNDTYALSRNNVSLAVNKKGIAWKSDKEHKFGNKVFPKNFQKGNITGGATLDPRIPLSEQEDLIVWMRTAALPTFRKLYGKIESDLEMGDTIHVKLNNNYNTYSFNGKKKLVLSTTSWLGGKNDFLGIAYLTVGGICFILALAFTIMYLVKPRRLGDPSYLSWNRNPGGR

SEQ ID NO: 31713 - protein, 349 aa, Arabidopsis thaliana
  misc_feature (1)..(349): Ceres Seq. ID no. 13588573
MSSNTASSSAGAAGSGDSSAARKNSKRPKYSKFTQQELPACKPILTPGWVISTFLIVSVIFIPLGVISLFASQDVVEIVDRYDTECIPAPARTNKVAYIQGDGDKVCNRDLKVTKRMKQPIYVYYQLENFYQNHRRYVKSRSDSQLRSTKYENQISACKPEDDVGGQPIVPCGLIAWSLFNDTYALSRNNVSLAVNKKGIAWKSDKEHKFGNKVFPKNFQKGNITGGATLDPRIPLSEQEDLIVWMRTAALPTFRKLYGKIESDLEMGDTIHVKLNNNYNTYSFNGKKKLVLSTTSWLGGKNDFLGIAYLTVGGICFILALAFTIMYLVKPRRLGDPSYLSWNRNPGGR

SEQ ID NO: 31714 - protein, 233 aa, Arabidopsis thaliana
  misc_feature (1)..(233): Ceres Seq. ID no. 13588574
MKQPIYVYYQLENFYQNHRRYVKSRSDSQLRSTKYENQISACKPEDDVGGQPIVPCGLIAWSLFNDTYALSRNNVSLAVNKKGIAWKSDKEHKFGNKVFPKNFQKGNITGGATLDPRIPLSEQEDLIVWMRTAALPTFRKLYGKIESDLEMGDTIHVKLNNNYNTYSFNGKKKLVLSTTSWLGGKNDFLGIAYLTVGGICFILALAFTIMYLVKPRRLGDPSYLSWNRNPGGR

SEQ ID NO: 31715 - DNA, 1650 bp, Arabidopsis thaliana
  misc_feature (1)..(1650): Ceres Seq. ID no. 13588592
aaatttatcggagcctccctccaaaattcaacaatggccacttctttaatgtctctgtcttcttcatttcttcaacctctgaaactcaaaaccctagcacaacccagaaacactgacttatctaccaccagaaaaatcataacaacatgcgattcccaaaacaacactggtaagtcaaaccccagcagcagaaaccctaatttccagaaacggcgaaactcctccaagtatgggacttctagaaggtcgatcctcaagaaatcgtttttacaagagcaagttactttcaccgcacgggtctctgatgacccccacgtggcaattatcggtggaggaatggcgggtttggtctgcgcattgaacctggaagctcgtggcgtccagtccacagttttcgatacggggatacatgggttaggaggaagacttggaacaagaattattgaaccacagggactaattttcgatcacgctgctcaattcttcaccgcggatgattctcggtttatcaaattggtcgatgggtggttagagaaaggacttgttcgagagtggaaaggtgccgtgggagagcttgaaattggaggtagcttctcacagtttccctcatcatcacctccaagatacattgctgctaatggcatgcgatctctcgctgattctttgctattagagagtcaaatggtgaatctggtaaggccttgttggatcagtaagttggaaccacttaatggtatgtggcatttaagtgagaatggaacacctcgtggtcagtttgatgtcatagttattgctcataatggtaaatgcgccaatcgcttgctttcagcatcaggcttgcccctagtggctaaacagatgaagaaactggatttgagttcaatatgggcgctattagcagcttttgatgatcctcttcccacagtgaactttgagggagcgtttgtgaaaggagttgaatcactgtcttggatgggaaataactctgcaaagcttggaaatggcagaactccaccacattgttggacttttttcagtactgcggcatatgggaaacagaacaaagttcctcaggaaaacatcccaacggtcacggcagagaaagttaaagccgggatgcttcaaggtgtggaaatcgcattggggttgcctgaaggctcacttcctaaaccggtttatacacgtctccagctatggggagcagctttgccgaagaacactcctgcagttccatgtatatttgatccacaaggccgtgctggtatatgcggtgattggcttctcggttctaacttagaatctgcagctataagcggtgcagccttaggaaaccatattgcggaattcttacagaacggtgaagctaatccagaagaatttgcaatcggtttacatgataggttaagtcctcttgctggccatgatattggtcagtttcctggtttaacatcagtgggagaaaaggaagaagctaatgcatatcagctgctgtgaatacatcagtctactgttacttgacgaaaaagctaagaagttttgcaaattaagcttacagtgatatcagtttctacttagaggctcaccattttcagcctccttcttcattggtgacaaaaccacagccgatttgaggtgctatatgaaacaaac

SEQ ID NO: 31716 - protein, 497 aa, Arabidopsis thaliana
  misc_feature (1)..(497): Ceres Seq. ID no. 13588593
KFIGASLQNSTMATSLMSLSSSFLQPLKLKTLAQPRNTDLSTTRKIITTCDSQNNTGKSNPSSRNPNFQKRRNSSKYGTSRRSILKKSFLQEQVTFTARVSDDPHVAIIGGGMAGLVCALNLEARGVQSTVFDTGIHGLGGRLGTRIIEPQGLIFDHAAQFFTADDSRFIKLVDGWLEKGLVREWKGAVGELEIGGSFSQFPSSSPPRYIAANGMRSLADSLLLESQMVNLVRPCWISKLEPLNGMWHLSENGTPRGQFDVIVIAHNGKCANRLLSASGLPLVAKQMKKLDLSSIWALLAAFDDPLPTVNFEGAFVKGVESLSWMGNNSAKLGNGRTPPHCWTFFSTAAYGKQNKVPQENIPTVTAEKVKAGMLQGVEIALGLPEGSLPKPVYTRLQLWGAALPKNTPAVPCIFDPQGRAGICGDWLLGSNLESAAISGAALGNHIAEFLQNGEANPEEFAIGLHDRLSPLAGHDIGQFPGLTSVGEKEEANAYQLL

SEQ ID NO: 31717 - protein, 486 aa, Arabidopsis thaliana
  misc_feature (1)..(486): Ceres Seq. ID no. 13588594
MATSLMSLSSSFLQPLKLKTLAQPRNTDLSTTRKIITTCDSQNNTGKSNPSSRNPNFQKRRNSSKYGTSRRSILKKSFLQEQVTFTARVSDDPHVAIIGGGMAGLVCALNLEARGVQSTVFDTGIHGLGGRLGTRIIEPQGLIFDHAAQFFTADDSRFIKLVDGWLEKGLVREWKGAVGELEIGGSFSQFPSSSPPRYIAANGMRSLADSLLLESQMVNLVRPCWISKLEPLNGMWHLSENGTPRGQFDVIVIAHNGKCANRLLSASGLPLVAKQMKKLDLSSIWALLAAFDDPLPTVNFEGAFVKGVESLSWMGNNSAKLGNGRTPPHCWTFFSTAAYGKQNKVPQENIPTVTAEKVKAGMLQGVEIALGLPEGSLPKPVYTRLQLWGAALPKNTPAVPCIFDPQGRAGICGDWLLGSNLESAAISGAALGNHIAEFLQNGEANPEEFAIGLHDRLSPLAGHDIGQFPGLTSVGEKEEANAYQLL

SEQ ID NO: 31718 - protein, 481 aa, Arabidopsis thaliana
  misc_feature (1)..(481): Ceres Seq. ID no. 13588595
MSLSSSFLQPLKLKTLAQPRNTDLSTTRKIITTCDSQNNTGKSNPSSRNPNFQKRRNSSKYGTSRRSILKKSFLQEQVTFTARVSDDPHVAIIGGGMAGLVCALNLEARGVQSTVFDTGIHGLGGRLGTRIIEPQGLIFDHAAQFFTADDSRFIKLVDGWLEKGLVREWKGAVGELEIGGSFSQFPSSSPPRYIAANGMRSLADSLLLESQMVNLVRPCWISKLEPLNGMWHLSENGTPRGQFDVIVIAHNGKCANRLLSASGLPLVAKQMKKLDLSSIWALLAAFDDPLPTVNFEGAFVKGVESLSWMGNNSAKLGNGRTPPHCWTFFSTAAYGKQNKVPQENIPTVTAEKVKAGMLQGVEIALGLPEGSLPKPVYTRLQLWGAALPKNTPAVPCIFDPQGRAGICGDWLLGSNLESAAISGAALGNHIAEFLQNGEANPEEFAIGLHDRLSPLAGHDIGQFPGLTSVGEKEEANAYQLL

SEQ ID NO: 31719 - DNA, 1116 bp, Arabidopsis thaliana
  misc_feature (1)..(1116): Ceres Seq. ID no. 13588617
atgttagcttggaatttcatcaaacactttccgtgcaagaatctctcccgccatatcctcagagacagcagagtcagacctctctgcttcttcacttcttctactcctccatcctccttttcaatctttgcgtctctctctacttcttcttcttcctcctcctcatcttcgtgcttcactgatgagtctttcgctgcaccttacctctcagttcgtatccactgtccaaaacatgccctcgatccattctcggaggcacttttgtgttttggagcaagctctgtagctgtagatgaagccatcgaagaagccgaccaagatgagacttctcttgcttcaaaagagatatgtatagaatcaatatttccagtgcatgaagaggtgaaaatgtgcatttcacaagctgcaaattccataggcttgaaagagatacccaaattcaaagttgaaatgggagatgaacttgactggattaccaaaaaccaggatttgtttcagcctgttgaaatcgccgagagactttggattgtacctgagtggacatctcctcctgtcgctgaagcggtaaacataattctgaaccctggatttgcgtttgggactggagaacatcctactactaagctgtgtctattgcttctacaaagtttgataaaaggcggagaagctttcctcgactatggtaccggttcaggaatacttgcaattgcagccctcaagtttggtgctgcatcatccgttggtgttgatattgatcctctagcaataaactctgcaattcataatgcagctctgaacaacattccgttggagaaactggagctgcaccttgcacctattgagaatagctcttctggaagagaaataccattgcaaaaggaacagtttgatgtagtcattgcaaacatactcttgaacccggttatgaatctggcggatcatatcctttcattcgtgaaacctggggcaaccattggcatttctggtatcttatctgaacagcttccaaatgtaagagaacggtactctcccttcttggaggacatttctgtagccacaataggtgattgggtatgcatgagtggtaccaagaaagaggagtttattgataactaa

SEQ ID NO: 31720 - protein, 371 aa, Arabidopsis thaliana
  misc_feature (1)..(371): Ceres Seq. ID no. 13588618
MLAWNFIKHFPCKNLSRHILRDSRVRPLCFFTSSTPPSSFSIFASLSTSSSSSSSSSCFTDESFAAPYLSVRIHCPKHALDPFSEALLCFGASSVAVDEAIEEADQDETSLASKEICIESIFPVHEEVKMCISQAANSIGLKEIPKFKVEMGDELDWITKNQDLFQPVEIAERLWIVPEWTSPPVAEAVNIILNPGFAFGTGEHPTTKLCLLLLQSLIKGGEAFLDYGTGSGILAIAALKFGAASSVGVDIDPLAINSAIHNAALNNIPLEKLELHLAPIENSSSGREIPLQKEQFDVVIANILLNPVMNLADHILSFVKPGATIGISGILSEQLPNVRERYSPFLEDISVATIGDWVCMSGTKKEEFIDN

SEQ ID NO: 31721 - protein, 242 aa, Arabidopsis thaliana
  misc_feature (1)..(242): Ceres Seq. ID no. 13588619
MCISQAANSIGLKEIPKFKVEMGDELDWITKNQDLFQPVEIAERLWIVPEWTSPPVAEAVNIILNPGFAFGTGEHPTTKLCLLLLQSLIKGGEAFLDYGTGSGILAIAALKFGAASSVGVDIDPLAINSAIHNAALNNIPLEKLELHLAPIENSSSGREIPLQKEQFDVVIANILLNPVMNLADHILSFVKPGATIGISGILSEQLPNVRERYSPFLEDISVATIGDWVCMSGTKKEEFIDN

SEQ ID NO: 31722 - protein, 221 aa, Arabidopsis thaliana
  misc_feature (1)..(221): Ceres Seq. ID no. 13588620
MGDELDWITKNQDLFQPVEIAERLWIVPEWTSPPVAEAVNIILNPGFAFGTGEHPTTKLCLLLLQSLIKGGEAFLDYGTGSGILAIAALKFGAASSVGVDIDPLAINSAIHNAALNNIPLEKLELHLAPIENSSSGREIPLQKEQFDVVIANILLNPVMNLADHILSFVKPGATIGISGILSEQLPNVRERYSPFLEDISVATIGDWVCMSGTKKEEFIDN

SEQ ID NO: 31723 - DNA, 4044 bp, Arabidopsis thaliana
  misc_feature (1)..(4044): Ceres Seq. ID no. 13588621
atgaacaaagtcgaagcaggcaatgagctcggcttccgggtcggattctccggtcatggtggtcacctccgcgtcgagcctttttacacggccgagagagacgacgcactgaactcacttcccgattttgtatcccctcctgcatttgccaaggaaacaaaagaatcaataaagaaacatattgaggagaagtatctcatcccgagactggaaccggatcagttttctgctgaaaaagctgagaatcagtgggattttgattggttttccagggtgaagatgccccttcaaccctctttgccaaggtccgttgtggttccgacttgggagttgccattcaggcgtcaaaaagaggatactgagaacggagcatgggagccaaaatcagtggaggtggatttgtcagaacaaatgtatggggatcaagattctggattttttccacgaatggtaggacctccgaaggattttctgagaggaagtgtcaacaatcgccctttccgtccaggtggcttggaggattcacagtcttcagagagagtccttccagagggtgtctctagtggccaatgggtacaggaattgctcaatgggggtcctgctcaaactgttcctcctagttttaagcagagtttagatcttggagatctgatgccatatccccaaacatggagcgtttatgaggatcatagttcacatggcaatgcttcagatgaaaattcggtctgtagatcaatgtcactggtgtacataaattattttacatttaattgtgatcatacagctggatctgagtctccaaaggcggaagctgaacccgatgctaaagcgagcataagcaatgaagtcagcaaaggactagagactgacgtcactgtgctggatgagattttgtcatcagcaaaaacagcaataatgtctgaagaggcagttactgggagcagcgataaacaactacggaaagagggatgggccactaaaggagatagccaagacattgcagaccggttttatgagcttgttcctgacatggcgattgaattccctttcgaattggacaactttcagaaggaggctatctgttgtttagaaaagggagagtctgtttttgtagcagcacatacatcggcggggaagacagttgttgcagaatatgcattcgctttggccaccaagcactgtacacgagcggtttatactgctccaattaaaaccatcagcaaccaaaaatacagagatttttgtgggaagtttgatgtaggacttctcacaggtgatgttagcataaggccagaggcatcttgtctgatcatgacaactgaaatattaaggtcaatgctttatcgtggtgctgatatcatacgtgatatagaatgggttatatttgatgaagttcactatgtcaatgacgtagagagaggggttgtttgggaagaagtcatcatcatgttgccaaggcatataaattttgtcctcctttctgcaacggtgccaaacacatttgaatttgctgattggattggccgaacaaaacaaaaggagatacgtgttactggcacgacaaaaagaccagttcccctagagcattgtcttttttattctggagaactctacaaagtttgtgagaatgaagtttttctttcaaaagggataaaggatgctaaagattcacaaaagaagaagaattcaaatgcagttagtgttgcacctaaacaacaaatgggatcttcagctcatcaagatgggagcaaatctcagaaacatgaagctcattctcgtggcaaacagaataaacactcaagtgcaaaagatgtgggaaaatcctcttacagtggtaacagtcagaacaatggggcatttagacgatcagcagcttcaaattggttactgcttatcaacaagcttttaaaaatgtccctattacctgtggttgtcttctgtttctcgaagaattattgtgataggtgtgccgacgccttgactgggaccgacctcaccagtagctctgagaaaagtgaaatccgtgtcttttgcgataaagcgttttcaagattgaaagggtctgatcggaatttacctcaggttctcagactccaaagcttacttcatagaggaattggtgttcatcatgctgggctgcttccaattgtaaaggaagttgttgaaatgcttttttgccgtggtgttattaaggtgctattttcaacggagacatttgccatgggggttaatgctccagctagaacggtcgtttttgatgctttgaggaagtttgatggcaaggaatttagacaattgcttcctggagagtacactcaaatggcaggacgtgctggcagaagaggacttgacaaaacgggcacagttgttgtcatgtgtcgcgatgaagttccagatgagagtgatctgaggcgtgtaattgttggaagcgcaacaagactagaatctcagtttcgactaacctacataatgatcctccatcttttacgtgttgaagaattaaaggtggaggacatgctgaaaagaagttttgctgaatttcatgcccagaagaaactacccgagaaacaacagcttctcatgataaaacgttctctaccaactaaacatattgaaattgatctattgatttattcatccagatgtattaaaggtgaaccggcaattgaagattactatgacatgtacatggaagcaaatgaatataacaacaagatgtcggaagcggtcatgcagtctccttatgcccagagttttcttgtacaaggaagagtagtggtcatgaaatctggaatgggcatagacaatttactcggaatcgttctgaagggaccttccaacactaacagacaatatgttgttttggtgataaaatctgaaataccgccaccggagaaaaatatggtcagcattggcaagaaaagttcagatccttctcaaggttattttattgcgcctaaatcaaaacgtggttttgaagaagaattttatacaaagccgagctctcgtaaaggtcccgttgtaataaagatagagctcccgtaccatggggttgctgctggtgtaggttacgaggttaaagggtttgataacaaagaatttttgtgcatatgcgatagcaagataaagattgatcaggtgcgcctactcgaggatgggaacaaggcagctttttctcagacggttcaacagcttctggatctgaaatcagacggaaacaaatttcctcctgctctagacccagtaaaagatttgaagctgaaagatgctgagcttgtggagacatactataaatggaccaacctattgcaaaagatgtccatgaataagtgccacggttgtgtcaaattggaagagcacatgaagttagctagggagattaagaagcataagacggatctcaaagatcttgaatttcaaatgtctgatgaagccctattacaaatgcctgcctttcagggccggatcgatgttctgaagaacattgggtgtatagatgatgacctcgtcgtccaaatcaaaggtcgtgtcgcttgcgagatgaattctggggaagaattgatttgcacagtgtgtctgttcgagaatcaattcgaagaattagaaccagaagaagcagtggctataatgtctgcctttgtcttccaacagaaaaacacttcagcgcctacactaactcctaagctggctaaggctaaacaaagactctatgatacagcaatcagacttggtgaacttcaagctcagtacaatttacaaatagaccctgaagaatatgctcaggagaatctcaaatttggtctggtcgaagtcgtctatgagtgggcaaaggggactccatttgcagagatatgtgaactgacagatgtcccggaaggtctgatagttcgaaccattgtgagattggatgagacatgccgtgaattcaagaacgcagctgccattatggggaactcggcgttacacaagaaaatggatgcagcttcaaatgccataaaacgtgacatcgtctttgcggctagtctgtatgtgaccggagtgtaa

SEQ ID NO: 31724 - protein, 1347 aa, Arabidopsis thaliana
  misc_feature (1)..(1347): Ceres Seq. ID no. 13588622
MNKVEAGNELGFRVGFSGHGGHLRVEPFYTAERDDALNSLPDFVSPPAFAKETKESIKKHIEEKYLIPRLEPDQFSAEKAENQWDFDWFSRVKMPLQPSLPRSVVVPTWELPFRRQKEDTENGAWEPKSVEVDLSEQMYGDQDSGFFPRMVGPPKDFLRGSVNNRPFRPGGLEDSQSSERVLPEGVSSGQWVQELLNGGPAQTVPPSFKQSLDLGDLMPYPQTWSVYEDHSSHGNASDENSVCRSMSLVYINYFTFNCDHTAGSESPKAEAEPDAKASISNEVSKGLETDVTVLDEILSSAKTAIMSEEAVTGSSDKQLRKEGWATKGDSQDIADRFYELVPDMAIEFPFELDNFQKEAICCLEKGESVFVAAHTSAGKTVVAEYAFALATKHCTRAVYTAPIKTISNQKYRDFCGKFDVGLLTGDVSIRPEASCLIMTTEILRSMLYRGADIIRDIEWVIFDEVHYVNDVERGVVWEEVIIMLPRHINFVLLSATVPNTFEFADWIGRTKQKEIRVTGTTKRPVPLEHCLFYSGELYKVCENEVFLSKGIKDAKDSQKKKNSNAVSVAPKQQMGSSAHQDGSKSQKHEAHSRGKQNKHSSAKDVGKSSYSGNSQNNGAFRRSAASNWLLLINKLLKMSLLPVVVFCFSKNYCDRCADALTGTDLTSSSEKSEIRVFCDKAFSRLKGSDRNLPQVLRLQSLLHRGIGVHHAGLLPIVKEVVEMLFCRGVIKVLFSTETFAMGVNAPARTVVFDALRKFDGKEFRQLLPGEYTQMAGRAGRRGLDKTGTVVVMCRDEVPDESDLRRVIVGSATRLESQFRLTYIMILHLLRVEELKVEDMLKRSFAEFHAQKKLPEKQQLLMIKRSLPTKHIEIDLLIYSSRCIKGEPAIEDYYDMYMEANEYNNKMSEAVMQSPYAQSFLVQGRVVVMKSGMGIDNLLGIVLKGPSNTNRQYVVLVIKSEIPPPEKNMVSIGKKSSDPSQGYFIAPKSKRGFEEEFYTKPSSRKGPVVIKIELPYHGVAAGVGYEVKGFDNKEFLCICDSKIKIDQVRLLEDGNKAAFSQTVQQLLDLKSDGNKFPPALDPVKDLKLKDAELVETYYKWTNLLQKMSMNKCHGCVKLEEHMKLAREIKKHKTDLKDLEFQMSDEALLQMPAFQGRIDVLKNIGCIDDDLVVQIKGRVACEMNSGEELICTVCLFENQFEELEPEEAVAIMSAFVFQQKNTSAPTLTPKLAKAKQRLYDTAIRLGELQAQYNLQIDPEEYAQENLKFGLVEVVYEWAKGTPFAEICELTDVPEGLIVRTIVRLDETCREFKNAAAIMGNSALHKKMDAASNAIKRDIVFAASLYVTGV

SEQ ID NO: 31725 - protein, 1254 aa, Arabidopsis thaliana
  misc_feature (1)..(1254): Ceres Seq. ID no. 13588623
MPLQPSLPRSVVVPTWELPFRRQKEDTENGAWEPKSVEVDLSEQMYGDQDSGFFPRMVGPPKDFLRGSVNNRPFRPGGLEDSQSSERVLPEGVSSGQWVQELLNGGPAQTVPPSFKQSLDLGDLMPYPQTWSVYEDHSSHGNASDENSVCRSMSLVYINYFTFNCDHTAGSESPKAEAEPDAKASISNEVSKGLETDVTVLDEILSSAKTAIMSEEAVTGSSDKQLRKEGWATKGDSQDIADRFYELVPDMAIEFPFELDNFQKEAICCLEKGESVFVAAHTSAGKTVVAEYAFALATKHCTRAVYTAPIKTISNQKYRDFCGKFDVGLLTGDVSIRPEASCLIMTTEILRSMLYRGADIIRDIEWVIFDEVHYVNDVERGVVWEEVIIMLPRHINFVLLSATVPNTFEFADWIGRTKQKEIRVTGTTKRPVPLEHCLFYSGELYKVCENEVFLSKGIKDAKDSQKKKNSNAVSVAPKQQMGSSAHQDGSKSQKHEAHSRGKQNKHSSAKDVGKSSYSGNSQNNGAFRRSAASNWLLLINKLLKMSLLPVVVFCFSKNYCDRCADALTGTDLTSSSEKSEIRVFCDKAFSRLKGSDRNLPQVLRLQSLLHRGIGVHHAGLLPIVKEVVEMLFCRGVIKVLFSTETFAMGVNAPARTVVFDALRKFDGKEFRQLLPGEYTQMAGRAGRRGLDKTGTVVVMCRDEVPDESDLRRVIVGSATRLESQFRLTYIMILHLLRVEELKVEDMLKRSFAEFHAQKKLPEKQQLLMIKRSLPTKHIEIDLLIYSSRCIKGEPAIEDYYDMYMEANEYNNKMSEAVMQSPYAQSFLVQGRVVVMKSGMGIDNLLGIVLKGPSNTNRQYVVLVIKSEIPPPEKNMVSIGKKSSDPSQGYFIAPKSKRGFEEEFYTKPSSRKGPVVIKIELPYHGVAAGVGYEVKGFDNKEFLCICDSKIKIDQVRLLEDGNKAAFSQTVQQLLDLKSDGNKFPPALDPVKDLKLKDAELVETYYKWTNLLQKMSMNKCHGCVKLEEHMKLAREIKKHKTDLKDLEFQMSDEALLQMPAFQGRIDVLKNIGCIDDDLVVQIKGRVACEMNSGEELICTVCLFENQFEELEPEEAVAIMSAFVFQQKNTSAPTLTPKLAKAKQRLYDTAIRLGELQAQYNLQIDPEEYAQENLKFGLVEVVYEWAKGTPFAEICELTDVPEGLIVRTIVRLDETCREFKNAAAIMGNSALHKKMDAASNAIKRDIVFAASLYVTGV

SEQ ID NO: 31726 - protein, 1210 aa, Arabidopsis thaliana
  misc_feature (1)..(1210): Ceres Seq. ID no. 13588624
MYGDQDSGFFPRMVGPPKDFLRGSVNNRPFRPGGLEDSQSSERVLPEGVSSGQWVQELLNGGPAQTVPPSFKQSLDLGDLMPYPQTWSVYEDHSSHGNASDENSVCRSMSLVYINYFTFNCDHTAGSESPKAEAEPDAKASISNEVSKGLETDVTVLDEILSSAKTAIMSEEAVTGSSDKQLRKEGWATKGDSQDIADRFYELVPDMAIEFPFELDNFQKEAICCLEKGESVFVAAHTSAGKTVVAEYAFALATKHCTRAVYTAPIKTISNQKYRDFCGKFDVGLLTGDVSIRPEASCLIMTTEILRSMLYRGADIIRDIEWVIFDEVHYVNDVERGVVWEEVIIMLPRHINFVLLSATVPNTFEFADWIGRTKQKEIRVTGTTKRPVPLEHCLFYSGELYKVCENEVFLSKGIKDAKDSQKKKNSNAVSVAPKQQMGSSAHQDGSKSQKHEAHSRGKQNKHSSAKDVGKSSYSGNSQNNGAFRRSAASNWLLLINKLLKMSLLPVVVFCFSKNYCDRCADALTGTDLTSSSEKSEIRVFCDKAFSRLKGSDRNLPQVLRLQSLLHRGIGVHHAGLLPIVKEVVEMLFCRGVIKVLFSTETFAMGVNAPARTVVFDALRKFDGKEFRQLLPGEYTQMAGRAGRRGLDKTGTVVVMCRDEVPDESDLRRVIVGSATRLESQFRLTYIMILHLLRVEELKVEDMLKRSFAEFHAQKKLPEKQQLLMIKRSLPTKHIEIDLLIYSSRCIKGEPAIEDYYDMYMEANEYNNKMSEAVMQSPYAQSFLVQGRVVVMKSGMGIDNLLGIVLKGPSNTNRQYVVLVIKSEIPPPEKNMVSIGKKSSDPSQGYFIAPKSKRGFEEEFYTKPSSRKGPVVIKIELPYHGVAAGVGYEVKGFDNKEFLCICDSKIKIDQVRLLEDGNKAAFSQTVQQLLDLKSDGNKFPPALDPVKDLKLKDAELVETYYKWTNLLQKMSMNKCHGCVKLEEHMKLAREIKKHKTDLKDLEFQMSDEALLQMPAFQGRIDVLKNIGCIDDDLVVQIKGRVACEMNSGEELICTVCLFENQFEELEPEEAVAIMSAFVFQQKNTSAPTLTPKLAKAKQRLYDTAIRLGELQAQYNLQIDPEEYAQENLKFGLVEVVYEWAKGTPFAEICELTDVPEGLIVRTIVRLDETCREFKNAAAIMGNSALHKKMDAASNAIKRDIVFAASLYVTGV

SEQ ID NO: 31727 - DNA, 1226 bp, Arabidopsis thaliana
  misc_feature (1)..(1226): Ceres Seq. ID no. 13588641
ggtggtcaaagtttccatacgtagcttctcttctctacactcacgtccaccacaatcctcgtgctccttcctctaaacccgtccgattcacgtacttttactatcttttctcaatccaacagctcacagtccacaaacaaatttcaaatcgcgtcctataaaatcccctctcctctgctccacactctctcaaaaccctagaaaaaatggcaggaaccggagttgtggcggtgtacggcgaaggagccatgacggagacgaaacagaaatctcccttctccgtgaaagttggtctcgctcagatgcttcgtggcggtgtaatcatggatgtcgtcaacgcagagcaagctcgaatcgctgaagaagctggcgcatgcgccgtgatggctcttgaacgtgttcccgccgatattcgagctcaaggcggtgttgctcgaatgagcgatccagagatgatcaaagaaatcaaaaacgccgtgacgattccggtgatggcgaaagctagaattggtcatttcgttgaagctcagatcctggaagcaatcggagttgattacgtcgacgagagtgaagttctcactctcgccgacgaagataatcacatcaacaaacataatttcaaaatcccttttgtttgtggatgtaggaatctcggtgaagctttaaggcggatccgtgaaggagccgccatgataagaaccaaaggtgaggctggaactggtaacgttgttgaagccgttaggcacgtgaggagtgtgaacggagctattcggttacttagaagcatggacgatgacgaggttttcacttacgcgaaaaagatcgctgcgccgtatgatttggttgtgcagactaaggagcttgggaggttaccggtggttcagttcgctgctggaggagtggcgacgccggcggatgcggcgttgatgatgcagttgggatgtgatggagtgtttgttgggtcgggtgttttcaagagtggagatccggtgaagagggctaaggctattgttcaggcggttacgaattatagagacgcggcggtgttggcggaggtgagctgtggtttaggtgaagccatggttggtcttaatttggatgataaggttgagaggttcgctagtcgttctgagtaaccaatcaaatttcagatgtttttatccataacgtttgtcactttaatatgtatccacaaaccaatattctcgatttattcaagattttat

SEQ ID NO: 31728 - protein, 309 aa, Arabidopsis thaliana
  misc_feature (1)..(309): Ceres Seq. ID no. 13588642
MAGTGVVAVYGEGAMTETKQKSPFSVKVGLAQMLRGGVIMDVVNAEQARIAEEAGACAVMALERVPADIRAQGGVARMSDPEMIKEIKNAVTIPVMAKARIGHFVEAQILEAIGVDYVDESEVLTLADEDNHINKHNFKIPFVCGCRNLGEALRRIREGAAMIRTKGEAGTGNVVEAVRHVRSVNGAIRLLRSMDDDEVFTYAKKIAAPYDLVVQTKELGRLPVVQFAAGGVATPADAALMMQLGCDGVFVGSGVFKSGDPVKRAKAIVQAVTNYRDAAVLAEVSCGLGEAMVGLNLDDKVERFASRSE

SEQ ID NO: 31729 - protein, 295 aa, Arabidopsis thaliana
  misc_feature (1)..(295): Ceres Seq. ID no. 13588643
MTETKQKSPFSVKVGLAQMLRGGVIMDVVNAEQARIAEEAGACAVMALERVPADIRAQGGVARMSDPEMIKEIKNAVTIPVMAKARIGHFVEAQILEAIGVDYVDESEVLTLADEDNHINKHNFKIPFVCGCRNLGEALRRIREGAAMIRTKGEAGTGNVVEAVRHVRSVNGAIRLLRSMDDDEVFTYAKKIAAPYDLVVQTKELGRLPVVQFAAGGVATPADAALMMQLGCDGVFVGSGVFKSGDPVKRAKAIVQAVTNYRDAAVLAEVSCGLGEAMVGLNLDDKVERFASRSE

SEQ ID NO: 31730 - protein, 277 aa, Arabidopsis thaliana
  misc_feature (1)..(277): Ceres Seq. ID no. 13588644
MLRGGVIMDVVNAEQARIAEEAGACAVMALERVPADIRAQGGVARMSDPEMIKEIKNAVTIPVMAKARIGHFVEAQILEAIGVDYVDESEVLTLADEDNHINKHNFKIPFVCGCRNLGEALRRIREGAAMIRTKGEAGTGNVVEAVRHVRSVNGAIRLLRSMDDDEVFTYAKKIAAPYDLVVQTKELGRLPVVQFAAGGVATPADAALMMQLGCDGVFVGSGVFKSGDPVKRAKAIVQAVTNYRDAAVLAEVSCGLGEAMVGLNLDDKVERFASRSE

SEQ ID NO: 31731 - DNA, 2122 bp, Arabidopsis thaliana
  misc_feature (1)..(2122): Ceres Seq. ID no. 13588667
gacacaaagtctcatttctcgttaatttccattttcgttatctctctctctcgccgatcaaaccctaggtgtatcaattcgttcagattcccggcggttggtctcactgtcatgtaggtttgattcatcttctcttctggatcttgagtgacgaagagagaagagatctgagtttttctgagagagagatttttctccctcgttgacccgatcagttttttttcgtcgctggggattttcaaattttttttgagggatcggttttgatttgttacgtagatggcggattcttcacccgattcgtgtttcaaaggaggcaaatttagtgctccagggtttcgatttcatccaactgatgaagagcttgtgatgtattatttgaagaggaagatttgtaggaagaggcttagagttaatgttatcggtgttgttgatgtttacaaaatggatcctgaggaattgcctggtcaatcaatgttgaagacgggagatagacagtggttctatttcactccaaggagtaggaagtatccaaacgcagctaggtctaatagaggaactgaaaatgggtattggaaggctacagggaaggatcgagtcattgagtataattctagatcggtgggacttaaaaagactcttgttttctatagaggccgggctcctagtggtgagcggactgattgggtgatgcatgagtatacgatggatgaagatgaactagggagatgtaagaaccctcaggagtactatgctctttataagttgttcaagaaaagtggggctggtcctaagaatggtgaacagtatggtgctccgtttcaagaagaggaatgggttgatgatgataatgaagatgtgaatgctattgctgtagctgtgccagagcaacctgtggttcgttatgaggatgctcgtcgtgtggatgagaggagactttttaatcctgttattcttcagttagaggatatcgatgagcttctcaatggaatccctaatgcacctggtgttcctcaaagatgtattcctcaggtgaatagtgaagaagagctgcagagtacgttggtgaataattctgctagagagttcttgccaaacggtcagcaatacaacaggccctcaagttttgactcattagagaccgctgaggtcacctcagctcctctggtgtttgagaaggaagatttcattgaaatggatgatcttcttctgatccctgaattcggagcttcttcaactgagaaagccgcacagttctcgaaccatggtgaattcgacgattttaatgagtttgaccaattgttccatgacgtttccatgtctttggatatggaacctattgatcagggaacttctgcaaatctgtcttctctgagtgattctgctaactacacatcagaccaaaaacagcaactcctttatcaacagttccaggaccagactcccgagaaccagctgaacaacatcatggatcctagtacaactctcaatcaaatcactagcgatatttggttcgaggatgatcaggccattctatttgatcaacaacaatccttttctggagcatttgcttcaccctcatcaggtgtgatgcctgattccaccaatcctactatgagtgtgaatgcccaaggccatgaaatccaaaatggtggtggaacaacaagccagttctcatcggctttgtgggcattaatggactcaataccttcaacgccagcctctgcgtgtgagggtccccttaaccgaacctttgtacgtatgtctagcttcagccgtatgaggttcaatggaaaggctaatggaacgccagtgagtactaccatagcaaagaagggtattagaaacagaggttttcttctattatcaatcgtgggtgctttgtgtgccatcttctgggtgttggtagccacagttcgagtctcaggtagaagtcttctcttgaaagactagtggtggttctcttgaactcttaactactggtaagttagaagaagaaaccatgatccacattagtgttcatgggattattgacctatctataatatatgaaactttgaatatgtacagagtttgaaagagtaaagtacaataattcgtgataaaggagtttcttttcctt

SEQ ID NO: 31732 - protein, 557 aa, Arabidopsis thaliana
  misc_feature (1)..(557): Ceres Seq. ID no. 13588668
MADSSPDSCFKGGKFSAPGFRFHPTDEELVMYYLKRKICRKRLRVNVIGVVDVYKMDPEELPGQSMLKTGDRQWFYFTPRSRKYPNAARSNRGTENGYWKATGKDRVIEYNSRSVGLKKTLVFYRGRAPSGERTDWVMHEYTMDEDELGRCKNPQEYYALYKLFKKSGAGPKNGEQYGAPFQEEEWVDDDNEDVNAIAVAVPEQPVVRYEDARRVDERRLFNPVILQLEDIDELLNGIPNAPGVPQRCIPQVNSEEELQSTLVNNSAREFLPNGQQYNRPSSFDSLETAEVTSAPLVFEKEDFIEMDDLLLIPEFGASSTEKAAQFSNHGEFDDFNEFDQLFHDVSMSLDMEPIDQGTSANLSSLSDSANYTSDQKQQLLYQQFQDQTPENQLNNIMDPSTTLNQITSDIWFEDDQAILFDQQQSFSGAFASPSSGVMPDSTNPTMSVNAQGHEIQNGGGTTSQFSSALWALMDSIPSTPASACEGPLNRTFVRMSSFSRMRFNGKANGTPVSTTIAKKGIRNRGFLLLSIVGALCAIFWVLVATVRVSGRSLLLKD

SEQ ID NO: 31733 - protein, 527 aa, Arabidopsis thaliana
  misc_feature (1)..(527): Ceres Seq. ID no. 13588669
MYYLKRKICRKRLRVNVIGVVDVYKMDPEELPGQSMLKTGDRQWFYFTPRSRKYPNAARSNRGTENGYWKATGKDRVIEYNSRSVGLKKTLVFYRGRAPSGERTDWVMHEYTMDEDELGRCKNPQEYYALYKLFKKSGAGPKNGEQYGAPFQEEEWVDDDNEDVNAIAVAVPEQPVVRYEDARRVDERRLFNPVILQLEDIDELLNGIPNAPGVPQRCIPQVNSEEELQSTLVNNSAREFLPNGQQYNRPSSFDSLETAEVTSAPLVFEKEDFIEMDDLLLIPEFGASSTEKAAQFSNHGEFDDFNEFDQLFHDVSMSLDMEPIDQGTSANLSSLSDSANYTSDQKQQLLYQQFQDQTPENQLNNIMDPSTTLNQITSDIWFEDDQAILFDQQQSFSGAFASPSSGVMPDSTNPTMSVNAQGHEIQNGGGTTSQFSSALWALMDSIPSTPASACEGPLNRTFVRMSSFSRMRFNGKANGTPVSTTIAKKGIRNRGFLLLSIVGALCAIFWVLVATVRVSGRSLLLKD

SEQ ID NO: 31734 - protein, 502 aa, Arabidopsis thaliana
  misc_feature (1)..(502): Ceres Seq. ID no. 13588670
MDPEELPGQSMLKTGDRQWFYFTPRSRKYPNAARSNRGTENGYWKATGKDRVIEYNSRSVGLKKTLVFYRGRAPSGERTDWVMHEYTMDEDELGRCKNPQEYYALYKLFKKSGAGPKNGEQYGAPFQEEEWVDDDNEDVNAIAVAVPEQPVVRYEDARRVDERRLFNPVILQLEDIDELLNGIPNAPGVPQRCIPQVNSEEELQSTLVNNSAREFLPNGQQYNRPSSFDSLETAEVTSAPLVFEKEDFIEMDDLLLIPEFGASSTEKAAQFSNHGEFDDFNEFDQLFHDVSMSLDMEPIDQGTSANLSSLSDSANYTSDQKQQLLYQQFQDQTPENQLNNIMDPSTTLNQITSDIWFEDDQAILFDQQQSFSGAFASPSSGVMPDSTNPTMSVNAQGHEIQNGGGTTSQFSSALWALMDSIPSTPASACEGPLNRTFVRMSSFSRMRFNGKANGTPVSTTIAKKGIRNRGFLLLSIVGALCAIFWVLVATVRVSGRSLLLKD

SEQ ID NO: 31735 - DNA, 1707 bp, Arabidopsis thaliana
  misc_feature (1)..(1707): Ceres Seq. ID no. 13588671
accacttaccatctgggttttgcttcattaaccattacagtgactctgcaatctttcaagttttcagatatcttctctttaagtggcccagattgtgttcgtctgtttctgtgagagtgagtaaaactctatttttcgaaaagatacattcttgcatgtgcgtagatcagccttgtatagaactgagattttggtgaagctttggattggtttctttgttctctctgttcttgtgaagggaacaacacaaagacggtggctttgctcggtaaatagattatggaacatggtttaccgtctattaaatcatggaagtcacttgttaagagaagaaacaatgctcaagaagggggtaaatcgtcatggaaaatgaaaccagttgtggtgctaatgtgtacagtacttttgatcttttggtataagactacaaatattcagtatgaacaaacagagatagaagaaacagattatccatttgagatggcaaaggaatctgaaccggtcagtgaaaagttgaaaggcttaccttttggtatcatgcaacctaaatcagatttggagttaaagccactttggtcaagtagtagtttgaggtcaaagagcggcgaattgaccaaccgtaacttgttggcaatgccggtaggacttaagcaaaaggataatgttgatgctgttgtaaagaagtttcttcctgcgaatttcactgtcattctatttcattatgatggaaacatggatcaatggtgggatctagagtggagctcaaaagccatacacattgttgcacataaccaaacaaaatggtggtttgcgaaacgttttctccatcctgatattgtctccatttacgattatgtttttctttgggatgaagatcttggagtggagaatttcaaccctcaaaagtacctgaggatagttaaaacagcgggactggagatatctcaaccggccttgcacccaaactcaactgaagttcaccatagaattacagtccggtctagaacgaaaatatttcataggcgagtttacgatagtagaggcaatatgaaatgttcaaatgctagtgaagggcccccatgcacaggatttgttgaaggaatggctccagtgttttcgagatctgcatggttttgcacttggaatctaatacaaaatgatctggttcatggttggggaatggatatgaaacttggatactgtgctcagggtgaccgtagcaagaaagtaggcattgtcgacagtgaatatatcttccatcaaggcattcaaacactaggtggaagcggttatcccgataagaagaactcagctcgcagcggagtaaataggagacgcggttctgcgacttttgattcaagaacagagatacggagacaatcaacgtgggagctgcaagcttttaaagaacggtggaaccaagcggttgcagaagacaaatactgggtggagcggtcttcaccgagccggaaccgaataggcaataaccggagattaaaaagaagtagtatgattccaagtttattgcagaggaaagctgaagagactacaacataaacagatacagttttaatcagattaaatatagagaaatgtttttttggttggtctcattgttatatataagttaatagttaatcatttacctctctttgattagtgtagttttcatgatcttctttaatggttcagtctctctccattttg

SEQ ID NO: 31736 - protein, 425 aa, Arabidopsis thaliana
  misc_feature (1)..(425): Ceres Seq. ID no. 13588672
MEHGLPSIKSWKSLVKRRNNAQEGGKSSWKMKPVVVLMCTVLLIFWYKTTNIQYEQTEIEETDYPFEMAKESEPVSEKLKGLPFGIMQPKSDLELKPLWSSSSLRSKSGELTNRNLLAMPVGLKQKDNVDAVVKKFLPANFTVILFHYDGNMDQWWDLEWSSKAIHIVAHNQTKWWFAKRFLHPDIVSIYDYVFLWDEDLGVENFNPQKYLRIVKTAGLEISQPALHPNSTEVHHRITVRSRTKIFHRRVYDSRGNMKCSNASEGPPCTGFVEGMAPVFSRSAWFCTWNLIQNDLVHGWGMDMKLGYCAQGDRSKKVGIVDSEYIFHQGIQTLGGSGYPDKKNSARSGVNRRRGSATFDSRTEIRRQSTWELQAFKERWNQAVAEDKYWVERSSPSRNRIGNNRRLKRSSMIPSLLQRKAEETTT

SEQ ID NO: 31737 - protein, 395 aa, Arabidopsis thaliana
  misc_feature (1)..(395): Ceres Seq. ID no. 13588673
MKPVVVLMCTVLLIFWYKTTNIQYEQTEIEETDYPFEMAKESEPVSEKLKGLPFGIMQPKSDLELKPLWSSSSLRSKSGELTNRNLLAMPVGLKQKDNVDAVVKKFLPANFTVILFHYDGNMDQWWDLEWSSKAIHIVAHNQTKWWFAKRFLHPDIVSIYDYVFLWDEDLGVENFNPQKYLRIVKTAGLEISQPALHPNSTEVHHRITVRSRTKIFHRRVYDSRGNMKCSNASEGPPCTGFVEGMAPVFSRSAWFCTWNLIQNDLVHGWGMDMKLGYCAQGDRSKKVGIVDSEYIFHQGIQTLGGSGYPDKKNSARSGVNRRRGSATFDSRTEIRRQSTWELQAFKERWNQAVAEDKYWVERSSPSRNRIGNNRRLKRSSMIPSLLQRKAEETTT

SEQ ID NO: 31738 - protein, 388 aa, Arabidopsis thaliana
  misc_feature (1)..(388): Ceres Seq. ID no. 13588674
MCTVLLIFWYKTTNIQYEQTEIEETDYPFEMAKESEPVSEKLKGLPFGIMQPKSDLELKPLWSSSSLRSKSGELTNRNLLAMPVGLKQKDNVDAVVKKFLPANFTVILFHYDGNMDQWWDLEWSSKAIHIVAHNQTKWWFAKRFLHPDIVSIYDYVFLWDEDLGVENFNPQKYLRIVKTAGLEISQPALHPNSTEVHHRITVRSRTKIFHRRVYDSRGNMKCSNASEGPPCTGFVEGMAPVFSRSAWFCTWNLIQNDLVHGWGMDMKLGYCAQGDRSKKVGIVDSEYIFHQGIQTLGGSGYPDKKNSARSGVNRRRGSATFDSRTEIRRQSTWELQAFKERWNQAVAEDKYWVERSSPSRNRIGNNRRLKRSSMIPSLLQRKAEETTT

SEQ ID NO: 31739 - DNA, 2113 bp, Arabidopsis thaliana
  misc_feature (1)..(2113): Ceres Seq. ID no. 13588679
ttttaagcttctcccgcaaaattcagcaaagctttcggaggaatctcctaacagtcaccaccaccaccaccgtctagggtttcgcgccgggatctaaaaaatcacaatcatgccggtgagtttgactccgaacgcaatcacggcgatacatgacggcgacgtgaatttgaagccgttgttacagattttagaaatcaaaatgataggaagaagtcaagagagaagccaggagaggtatcgtttcctcatttcagatggtgtttctgctcaacatgctatggtcgcggttcagcttaatgatcgagtcaagtcaggacaatttgagaaaggatctatcgttcagctgattgattacatttgtagcgacgttaaaggccgcaagcttattgtggtgctgaacatggagacgatagtacaacagtctgaaaccattgggaacccctacaatatttggagaaacagatacagaagcccagaagacattttcaggtacgggcaatataccgcctccgaacagggttgtttttaatgaaccaatggttcagcattctgttaatagagcacctcccaggggtgtaaacattcaaaatcaagccaacaatactccaagcttcaggccatctgttcaaccttcatatcaaccgcctgcaagttacagaaatcatggacccatcatgaagaacgaggctccagctcgagtcatccctattgctgctctcaatccataccaaggtcgatgggctattaaggctagagtaactgcgaaaggagatatcagacgatataacaatgcaaaaggagatggaaaggttttctcgtttgatctgcttgactatgatggaggggagattcgggttacgtgctttaatgctcttgttgaccgtttctatgatgttactgaggttggtaaggtatatttgatttcaaagggaagtttgaagcctgcacagaaaaatttcaaccacttaaagaatgaatgggaaattttcttggagtcaacatcgactgtggagctttgccctgatgaagatggctccataccaaagcagcaattctccttccgcccaataagtgacattgagaacgctgagaacaataccatactcgatgtcattggtgtggtgacttctgtgaacccctcggtgccaatcttgagaaagaacgggatggaaacccataggaggatcctgaatctaaaggatgaatcaggaaaggctgtagaggtaacactttggggagaattctgtaaccgagatggtcggcaactggaagagatggttgattcagcttttcacccggttttagcaataaaagctggaaaagtaagcgacttcagtgggaaatcagtagggacaatatcttcaacacagctcttcataaatccagatttccctgaagctcataaactacggacctggttcgattacgggggaaaagacactgcttccttctccatctccagggacactatgcctggaggagtttccaggaacgagataaggaaaaatgtttctcagatcaaagaggaaggtcttggaagatcagataagcctgactggatcactgtgaaagcaaccatatcattcatcaaaacagatagcttctgttatacagcttgtcctttgatgatcggggataaacaatgcaacaagaaggttacacggtctggaacaaacaggtggctctgtgaccggtgcaaccaagagtctgatgaatgcgactatagataccttcttcaggtacagattcaagaccacactgggttgacttggataaccgcgtttcaagaaacaggagaagaaataatgggatgtccggctaagaagctttacgcaatgaaatacgaattggagaaggaggaagagttcgcagagattgttagagacagactgtttcatcagtacatgttgaagctgaagatcaaagaggaatcgtatggggatgaacaaagagtgaagatgactgttgtgaaggttgataaggtgaattatacatccgagagtaaatacatgcttgatttgctcgtaaggtaagttcgttctaggtattacagtgaggtatttcaattaactcagaatatgcaagctcgagtttagtacactattatattacg

SEQ ID NO: 31740 - protein, 498 aa, Arabidopsis thaliana
  misc_feature (1)..(498): Ceres Seq. ID no. 13588680
MVQHSVNRAPPRGVNIQNQANNTPSFRPSVQPSYQPPASYRNHGPIMKNEAPARVIPIAALNPYQGRWAIKARVTAKGDIRRYNNAKGDGKVFSFDLLDYDGGEIRVTCFNALVDRFYDVTEVGKVYLISKGSLKPAQKNFNHLKNEWEIFLESTSTVELCPDEDGSIPKQQFSFRPISDIENAENNTILDVIGVVTSVNPSVPILRKNGMETHRRILNLKDESGKAVEVTLWGEFCNRDGRQLEEMVDSAFHPVLAIKAGKVSDFSGKSVGTISSTQLFINPDFPEAHKLRTWFDYGGKDTASFSISRDTMPGGVSRNEIRKNVSQIKEEGLGRSDKPDWITVKATISFIKTDSFCYTACPLMIGDKQCNKKVTRSGTNRWLCDRCNQESDECDYRYLLQVQIQDHTGLTWITAFQETGEEIMGCPAKKLYAMKYELEKEEEFAEIVRDRLFHQYMLKLKIKEESYGDEQRVKMTVVKVDKVNYTSESKYMLDLLVR

SEQ ID NO: 31741 - protein, 452 aa, Arabidopsis thaliana
  misc_feature (1)..(452): Ceres Seq. ID no. 13588681
MKNEAPARVIPIAALNPYQGRWAIKARVTAKGDIRRYNNAKGDGKVFSFDLLDYDGGEIRVTCFNALVDRFYDVTEVGKVYLISKGSLKPAQKNFNHLKNEWEIFLESTSTVELCPDEDGSIPKQQFSFRPISDIENAENNTILDVIGVVTSVNPSVPILRKNGMETHRRILNLKDESGKAVEVTLWGEFCNRDGRQLEEMVDSAFHPVLAIKAGKVSDFSGKSVGTISSTQLFINPDFPEAHKLRTWFDYGGKDTASFSISRDTMPGGVSRNEIRKNVSQIKEEGLGRSDKPDWITVKATISFIKTDSFCYTACPLMIGDKQCNKKVTRSGTNRWLCDRCNQESDECDYRYLLQVQIQDHTGLTWITAFQETGEEIMGCPAKKLYAMKYELEKEEEFAEIVRDRLFHQYMLKLKIKEESYGDEQRVKMTVVKVDKVNYTSESKYMLDLLVR

SEQ ID NO: 31742 - protein, 288 aa, Arabidopsis thaliana
  misc_feature (1)..(288): Ceres Seq. ID no. 13588682
METHRRILNLKDESGKAVEVTLWGEFCNRDGRQLEEMVDSAFHPVLAIKAGKVSDFSGKSVGTISSTQLFINPDFPEAHKLRTWFDYGGKDTASFSISRDTMPGGVSRNEIRKNVSQIKEEGLGRSDKPDWITVKATISFIKTDSFCYTACPLMIGDKQCNKKVTRSGTNRWLCDRCNQESDECDYRYLLQVQIQDHTGLTWITAFQETGEEIMGCPAKKLYAMKYELEKEEEFAEIVRDRLFHQYMLKLKIKEESYGDEQRVKMTVVKVDKVNYTSESKYMLDLLVR

SEQ ID NO: 31743 - DNA, 789 bp, Arabidopsis thaliana
  misc_feature (1)..(789): Ceres Seq. ID no. 13588691
atggataaaagatggagtcttcaaggtatgaatgctcttgtgaccggtggcactaaaggcatcggggaagctgttgtggaggaactgtcaattttgggagcaagagtccacacatgtgctagagacgagactcagcttcaagaacgtttacgtgaatggcaagaaaaagggtttcaggtcaccacttctatctgcgacgtttctttgcgtgagcaacgagagaaactcatggaaaccgtttcctctctcttccaaggaaaactcaacatcctcgtgaacaatgtgggaacgttaatgctcaagccgaccacagagtatacagcagaagaattctcgtttcttatggctacaaatctcgactcagctttccatatttcacagcttgcgcaccctttgttgaaagcctctggctcagggagcattgtgctcatgtcctctattgccggagtcgtgcatgtcggtgttggatccatctatggagcaacaaaaggagccatgaatcagttggctagaaacttagcttgcgaatgggcaagcgacaacataaggactaacgctatttgtccatggttaatcacaactcctttgattagtgatcttctcagtgttgaggagatgaaaaaagaagcagaggaaaggacacccatggggcgtgtgggagaggcaaatgaagtctcaccgcttgtggcatttctttgtcttcctgcagcttcttatattactggtcaagtcatttgtgttgatggaggtctcactgttaatggcttctcctatcagccacatgcttga

SEQ ID NO: 31744 - protein, 262 aa, Arabidopsis thaliana
  misc_feature (1)..(262): Ceres Seq. ID no. 13588692
MDKRWSLQGMNALVTGGTKGIGEAVVEELSILGARVHTCARDETQLQERLREWQEKGFQVTTSICDVSLREQREKLMETVSSLFQGKLNILVNNVGTLMLKPTTEYTAEEFSFLMATNLDSAFHISQLAHPLLKASGSGSIVLMSSIAGVVHVGVGSIYGATKGAMNQLARNLACEWASDNIRTNAICPWLITTPLISDLLSVEEMKKEAEERTPMGRVGEANEVSPLVAFLCLPAASYITGQVICVDGGLTVNGFSYQPHA

SEQ ID NO: 31745 - protein, 253 aa, Arabidopsis thaliana
  misc_feature (1)..(253): Ceres Seq. ID no. 13588693
MNALVTGGTKGIGEAVVEELSILGARVHTCARDETQLQERLREWQEKGFQVTTSICDVSLREQREKLMETVSSLFQGKLNILVNNVGTLMLKPTTEYTAEEFSFLMATNLDSAFHISQLAHPLLKASGSGSIVLMSSIAGVVHVGVGSIYGATKGAMNQLARNLACEWASDNIRTNAICPWLITTPLISDLLSVEEMKKEAEERTPMGRVGEANEVSPLVAFLCLPAASYITGQVICVDGGLTVNGFSYQPHA

SEQ ID NO: 31746 - protein, 186 aa, Arabidopsis thaliana
  misc_feature (1)..(186): Ceres Seq. ID no. 13588694
METVSSLFQGKLNILVNNVGTLMLKPTTEYTAEEFSFLMATNLDSAFHISQLAHPLLKASGSGSIVLMSSIAGVVHVGVGSIYGATKGAMNQLARNLACEWASDNIRTNAICPWLITTPLISDLLSVEEMKKEAEERTPMGRVGEANEVSPLVAFLCLPAASYITGQVICVDGGLTVNGFSYQPHA

SEQ ID NO: 31747 - DNA, 1182 bp, Arabidopsis thaliana
  misc_feature (1)..(1182): Ceres Seq. ID no. 13588695
atggaagtttccggcgtcgtcctccgacaaattccatgtgtttcttcaggttccgttgcaggtctccgattagtatcggaattttccggtaataccagaacggtagggtttcgaaccagaagatttcgtggtattgtgtgtaataatgagtttgcggataaagggcatgtgaattactatatcgagccaacgagatgcggcgaggagaaagagaaggttaaggttatggagaaggagaagaaggcgttgaagaagaaggcgaaagttcttaaaagtctttctaagaacttggatatgttctctagtatagggtttggtcttgatcctgaagctggtttggttggtgagattcagaccaagacaatctcggaagctacagagatattggttaagcagctggagcagttgaaagcagaggagaagatattgaagaaacagaggaaagaagagaaggctaaagccaaagccatgaagaagatgactgaaatggactctgaatcatcttcttcgtctgaatcaagtgatagtgattgtgataaaggcaaagttgtggacatgagctctttaagaaacaaggctaaaccggttcttgagccgttacaaccagaagccacagtagcaacccttcctaggatccaagaggatgcaatttcttgcaagaacaccagtgaagcattgcagattgctctacaaacatccacaatttttccttcaatggccaatcctggacagacattgaagacggtagaagcggtttcagtggttggattaccattgaatagagtagaagtgtgtatgggagggaagtgtaagagatcaggaggagctttgttgttggatgagtttcaaagggcgatgacgggtttcgaaggatctgctgtggcttgcaagtgcatggggaagtgtcgtgatggcccaaacgttagagttgtgaaggagactgatgctgtgatgactgattcagttaggacaccatccaagaccctttgtgtaggagttggattgcaggatgtggaaactattgtgacaagtttctttgatgaagaatgtagcagagaaggactcggttctgtctcatattgaaagtgttttgaaacggctaatgttttatatagtgtggtgctttctcattgtacatatttaccttctcgataagtcattgatataagccgtgtaattgcg

SEQ ID NO: 31748 - protein, 360 aa, Arabidopsis thaliana
  misc_feature (1)..(360): Ceres Seq. ID no. 13588696
MEVSGVVLRQIPCVSSGSVAGLRLVSEFSGNTRTVGFRTRRFRGIVCNNEFADKGHVNYYIEPTRCGEEKEKVKVMEKEKKALKKKAKVLKSLSKNLDMFSSIGFGLDPEAGLVGEIQTKTISEATEILVKQLEQLKAEEKILKKQRKEEKAKAKAMKKMTEMDSESSSSSESSDSDCDKGKVVDMSSLRNKAKPVLEPLQPEATVATLPRIQEDAISCKNTSEALQIALQTSTIFPSMANPGQTLKTVEAVSVVGLPLNRVEVCMGGKCKRSGGALLLDEFQRAMTGFEGSAVACKCMGKCRDGPNVRVVKETDAVMTDSVRTPSKTLCVGVGLQDVETIVTSFFDEECSREGLGSVSY

SEQ ID NO: 31749 - protein, 285 aa, Arabidopsis thaliana
  misc_feature (1)..(285): Ceres Seq. ID no. 13588697
MEKEKKALKKKAKVLKSLSKNLDMFSSIGFGLDPEAGLVGEIQTKTISEATEILVKQLEQLKAEEKILKKQRKEEKAKAKAMKKMTEMDSESSSSSESSDSDCDKGKVVDMSSLRNKAKPVLEPLQPEATVATLPRIQEDAISCKNTSEALQIALQTSTIFPSMANPGQTLKTVEAVSVVGLPLNRVEVCMGGKCKRSGGALLLDEFQRAMTGFEGSAVACKCMGKCRDGPNVRVVKETDAVMTDSVRTPSKTLCVGVGLQDVETIVTSFFDEECSREGLGSVSY

SEQ ID NO: 31750 - protein, 262 aa, Arabidopsis thaliana
  misc_feature (1)..(262): Ceres Seq. ID no. 13588698
MFSSIGFGLDPEAGLVGEIQTKTISEATEILVKQLEQLKAEEKILKKQRKEEKAKAKAMKKMTEMDSESSSSSESSDSDCDKGKVVDMSSLRNKAKPVLEPLQPEATVATLPRIQEDAISCKNTSEALQIALQTSTIFPSMANPGQTLKTVEAVSVVGLPLNRVEVCMGGKCKRSGGALLLDEFQRAMTGFEGSAVACKCMGKCRDGPNVRVVKETDAVMTDSVRTPSKTLCVGVGLQDVETIVTSFFDEECSREGLGSVSY

SEQ ID NO: 31751 - DNA, 1454 bp, Arabidopsis thaliana
  misc_feature (1)..(1454): Ceres Seq. ID no. 13588706
gactaacaattagcaacaaaataaaagcacacgaattttcaaatctttctcttctctcgctctctcgaattcttctctctgttcctcgtagatcccctctgtttccgttttcgtcttttcgaattccgaagatctcaaatgggtgaggatgcaatctcaggtaatctcaagaatctaacgatcgacacaagagattcagaaactcttgtggtatgtttcggtgaaatgttgattgattttgttcctacggtgggaggtgtttcattggctgaagcaccagctttcaagaaagctcctggaggagctcctgctaatgtagctgttggtgtctctagacttggtggctcctctgctttcattggaaaggttggtgatgatgagtttggaagaatgttagctgatattctaaggctgaacaatgttgacaactctgggatgagattcgaccataatgcacggactgctttggcctttgttacgctaagaggtgatggagagagggagtttttgttcttcaggcatccgagtgctgatatgcttcttttggaatctgagcttgacaagaacctcatccaaaaggccaagatctttcactacggatctatcagtttgattgaggaaccttgccgttctactcagcttgtagctatgaaaatcgctaaggctgcagggagtcttttatcttatgacccgaatttgagattgccgttgtggccatcagaagaagctgctaggaaagagataatgagtatctggaatttagctgatgttataaagattagcgaagacgagataacattcctgaccggtggtgatgatccttatgatgatgatgtggtgttgcaaaagctctttcatcccaatcttaagcttcttgttgtttcagaaggacctaatggctgtagatactacactcaggagtttaaaggtagagttggtggagtaaaagtgaagccagttgatacaaccggtgcaggagatgcattcgtgagcgggttattgaacagcttagcttctgatcttactcttctcaaggatgagaagaaactaagagaggcgcttctatttgcaaacgcatgtggagccattacagtaacagagagaggagcgataccggcgatgccaagcatggatgctgttcaagatcttctttcttctactcgctcctaaaatgcttcaaaagtctcttttgagtgtatcaattcattaccttttacagtgtttttgtttttttaaatatttttccccaatttgtaggaactcaagaatgttgtgtgtgtttttttagtttgttgttgatctcccggagttttagtattggggtggtttggttttactattatcaagttaggttttctacaaagaacaaattcatgctttgtaaaaactacttgccgttttatgtaacgagaacgacacacactctttaacgcaaaaccattaattgtttagtt

SEQ ID NO: 31752 - protein, 343 aa, Arabidopsis thaliana
  misc_feature (1)..(343): Ceres Seq. ID no. 13588707
MGEDAISGNLKNLTIDTRDSETLVVCFGEMLIDFVPTVGGVSLAEAPAFKKAPGGAPANVAVGVSRLGGSSAFIGKVGDDEFGRMLADILRLNNVDNSGMRFDHNARTALAFVTLRGDGEREFLFFRHPSADMLLLESELDKNLIQKAKIFHYGSISLIEEPCRSTQLVAMKIAKAAGSLLSYDPNLRLPLWPSEEAARKEIMSIWNLADVIKISEDEITFLTGGDDPYDDDVVLQKLFHPNLKLLVVSEGPNGCRYYTQEFKGRVGGVKVKPVDTTGAGDAFVSGLLNSLASDLTLLKDEKKLREALLFANACGAITVTERGAIPAMPSMDAVQDLLSSTRS

SEQ ID NO: 31753 - protein, 314 aa, Arabidopsis thaliana
  misc_feature (1)..(314): Ceres Seq. ID no. 13588708
MLIDFVPTVGGVSLAEAPAFKKAPGGAPANVAVGVSRLGGSSAFIGKVGDDEFGRMLADILRLNNVDNSGMRFDHNARTALAFVTLRGDGEREFLFFRHPSADMLLLESELDKNLIQKAKIFHYGSISLIEEPCRSTQLVAMKIAKAAGSLLSYDPNLRLPLWPSEEAARKEIMSIWNLADVIKISEDEITFLTGGDDPYDDDVVLQKLFHPNLKLLVVSEGPNGCRYYTQEFKGRVGGVKVKPVDTTGAGDAFVSGLLNSLASDLTLLKDEKKLREALLFANACGAITVTERGAIPAMPSMDAVQDLLSSTRS

SEQ ID NO: 31754 - protein, 259 aa, Arabidopsis thaliana
  misc_feature (1)..(259): Ceres Seq. ID no. 13588709
MLADILRLNNVDNSGMRFDHNARTALAFVTLRGDGEREFLFFRHPSADMLLLESELDKNLIQKAKIFHYGSISLIEEPCRSTQLVAMKIAKAAGSLLSYDPNLRLPLWPSEEAARKEIMSIWNLADVIKISEDEITFLTGGDDPYDDDVVLQKLFHPNLKLLVVSEGPNGCRYYTQEFKGRVGGVKVKPVDTTGAGDAFVSGLLNSLASDLTLLKDEKKLREALLFANACGAITVTERGAIPAMPSMDAVQDLLSSTRS

SEQ ID NO: 31755 - DNA, 1426 bp, Arabidopsis thaliana
  misc_feature (1)..(1426): Ceres Seq. ID no. 13588718
gagagagagacactgaaacatagagagaagaaaaagaagaggtttagagagagaaaaatggcgtcaaagctctgcgattcgtgcaaatcagcgacggcggcgttatactgccgaccagacgcagcgtttctatgcttaagctgcgattcaaaagtccacgcggcgaacaaactcgcgtcacgacacgcgcgcgtgtggatgtgtgaagtgtgcgagcaagcaccggcacacgtcacgtgcaaagcagacgcggccgcgttatgcgtcacgtgcgaccgtgatatccactcggctaatccgttagctcgccgtcacgaacgcgttcccgttactccgttttacgattccgtctctagtgacggttccgttaaacacaccgccgttaatttccttgacgactgttacttctccgatatagatggtaacggaagccgtgaagaagaggaggaagaagctgcttcgtggctgttacttcccaatccaaagactacaacgacggcgacggcggggatcgttgctgttacttcagctgaggaagttccgggagatagtccggagatgaacactggtcaacagtatttgttctcggatccggatccgtatctggatctggattatggaaatgttgatccgaaggtggaatcgttagagcagaatagctccggtactgatggtgttgttccggtggagaatcggacggttaggattccgacggtgaacgagaattgctttgaaatggattttaccggaggatctaaaggctttacttatggtggtggttacaattgcatcagtcacagcgtgtcatcatcgtcgatggaagtgggagtggtgccagatggtggttcggtggctgatgtatcgtatccttacggtggtcctgcaaccagtggagctgatccggggacacagcgggctgttccgctgacttcagctgagagagaagcgagggtaatgaggtacagagagaagaggaagaacaggaagtttgagaagactataaggtatgcttcaaggaaagcgtatgcggaaatgagaccgagaatcaagggacggtttgcgaagcggacggatacaaatgagagcaatgatgtggttggtcatggtggtatctttagtgggttcggacttgtacctacattttagatattgagagagggagagactctaaaatggaagatggtgggtggtttggtgtttgttttagtaataaggtttttaacgaacgtttaatttaaacgagtttgtttgttttttgttgatgagtatttttagttgttgtgggcgatgaagaggaagagaagtgagtgggtggtgtttaactgtttataagtaacttgttttgtatatatcgtgattttgaatatgttcttgtttatgttatgtactcaaactatttagaatcaacaagtttacaaaatttggg

SEQ ID NO: 31756 - protein, 381 aa, Arabidopsis thaliana
  misc_feature (1)..(381): Ceres Seq. ID no. 15220897
ERETLKHREKKKKRFRERKMASKLCDSCKSATAALYCRPDAAFLCLSCDSKVHAANKLASRHARVWMCEVCEQAPAHVTCKADAAALCVTCDRDIHSANPLARRHERVPVTPFYDSVSSDGSVKHTAVNFLDDCYFSDIDGNGSREEEEEEAASWLLLPNPKTTTTATAGIVAVTSAEEVPGDSPEMNTGQQYLFSDPDPYLDLDYGNVDPKVESLEQNSSGTDGVVPVENRTVRIPTVNENCFEMDFTGGSKGFTYGGGYNCISHSVSSSSMEVGVVPDGGSVADVSYPYGGPATSGADPGTQRAVPLTSAEREARVMRYREKRKNRKFEKTIRYASRKAYAEMRPRIKGRFAKRTDTNESNDVVGHGGIFSGFGLVPTF

SEQ ID NO: 31757 - protein, 362 aa, Arabidopsis thaliana
  misc_feature (1)..(362): Ceres Seq. ID no. 15220898
MASKLCDSCKSATAALYCRPDAAFLCLSCDSKVHAANKLASRHARVWMCEVCEQAPAHVTCKADAAALCVTCDRDIHSANPLARRHERVPVTPFYDSVSSDGSVKHTAVNFLDDCYFSDIDGNGSREEEEEEAASWLLLPNPKTTTTATAGIVAVTSAEEVPGDSPEMNTGQQYLFSDPDPYLDLDYGNVDPKVESLEQNSSGTDGVVPVENRTVRIPTVNENCFEMDFTGGSKGFTYGGGYNCISHSVSSSSMEVGVVPDGGSVADVSYPYGGPATSGADPGTQRAVPLTSAEREARVMRYREKRKNRKFEKTIRYASRKAYAEMRPRIKGRFAKRTDTNESNDVVGHGGIFSGFGLVPTF

SEQ ID NO: 31758 - protein, 315 aa, Arabidopsis thaliana
  misc_feature (1)..(315): Ceres Seq. ID no. 15220899
MCEVCEQAPAHVTCKADAAALCVTCDRDIHSANPLARRHERVPVTPFYDSVSSDGSVKHTAVNFLDDCYFSDIDGNGSREEEEEEAASWLLLPNPKTTTTATAGIVAVTSAEEVPGDSPEMNTGQQYLFSDPDPYLDLDYGNVDPKVESLEQNSSGTDGVVPVENRTVRIPTVNENCFEMDFTGGSKGFTYGGGYNCISHSVSSSSMEVGVVPDGGSVADVSYPYGGPATSGADPGTQRAVPLTSAEREARVMRYREKRKNRKFEKTIRYASRKAYAEMRPRIKGRFAKRTDTNESNDVVGHGGIFSGFGLVPTF

SEQ ID NO: 31759 - DNA, 878 bp, Arabidopsis thaliana
  misc_feature (1)..(878): Ceres Seq. ID no. 13588723
gggtaggggaattttgctcttcgtcttgctatttcagatgtataataacatgggacctcaaccggggatgccaagacctccaggaaaccctgagcctggtccatttggtaatcctttcactggagctggctcgggttttatccgtggtggtttgggagcgtatggggagagaattttaggatcgagctctgagtatgttcagagcaatataagccggtacttctctgatccgcaatactatttccaagtgaatgatcaatatgtgaggaataaactgaaggttgttctgtttcctttcctacaccggggacactggaccagaatatctgaaccagttggtggtaggctctcatacaagcctccaatatatgatatcaatgctccagacttgtacattccctttatggcatttggtacctacgttgttcttgctggtctttcattgggacttaatggaaagtttacaccggaagctttgaattggctgtttgtgaaaggattggttggttggtttttgcaagtaatgctcctgaaagtaacacttctatcacttggtagtggagaggcaccattactagatattgtggcatacggagggtatgcttttgctggtctgtgtcttgcgggctttgccaaaataatgtggggatactcgtactacgcgttgatgccatggacttgtctatgcactgggattttcttggtgaagacgatgaaacgtgttctgtttgctgaagtaagaagttacgattcgagcaaacatcactaccttcttctgtttttagccttggtccagttcccacttttgatatggcttggtaacattagtgttaattggcttctttgaaatgaaaaagacgtttttgtgaattcttatt

SEQ ID NO: 31760 - protein, 281 aa, Arabidopsis thaliana
  misc_feature (1)..(281): Ceres Seq. ID no. 13588724
GRGILLFVLLFQMYNNMGPQPGMPRPPGNPEPGPFGNPFTGAGSGFIRGGLGAYGERILGSSSEYVQSNISRYFSDPQYYFQVNDQYVRNKLKVVLFPFLHRGHWTRISEPVGGRLSYKPPIYDINAPDLYIPFMAFGTYVVLAGLSLGLNGKFTPEALNWLFVKGLVGWFLQVMLLKVTLLSLGSGEAPLLDIVAYGGYAFAGLCLAGFAKIMWGYSYYALMPWTCLCTGIFLVKTMKRVLFAEVRSYDSSKHHYLLLFLALVQFPLLIWLGNISVNWLL

SEQ ID NO: 31761 - protein, 269 aa, Arabidopsis thaliana
  misc_feature (1)..(269): Ceres Seq. ID no. 13588725
MYNNMGPQPGMPRPPGNPEPGPFGNPFTGAGSGFIRGGLGAYGERILGSSSEYVQSNISRYFSDPQYYFQVNDQYVRNKLKVVLFPFLHRGHWTRISEPVGGRLSYKPPIYDINAPDLYIPFMAFGTYVVLAGLSLGLNGKFTPEALNWLFVKGLVGWFLQVMLLKVTLLSLGSGEAPLLDIVAYGGYAFAGLCLAGFAKIMWGYSYYALMPWTCLCTGIFLVKTMKRVLFAEVRSYDSSKHHYLLLFLALVQFPLLIWLGNISVNWLL

SEQ ID NO: 31762 - protein, 265 aa, Arabidopsis thaliana
  misc_feature (1)..(265): Ceres Seq. ID no. 13588726
MGPQPGMPRPPGNPEPGPFGNPFTGAGSGFIRGGLGAYGERILGSSSEYVQSNISRYFSDPQYYFQVNDQYVRNKLKVVLFPFLHRGHWTRISEPVGGRLSYKPPIYDINAPDLYIPFMAFGTYVVLAGLSLGLNGKFTPEALNWLFVKGLVGWFLQVMLLKVTLLSLGSGEAPLLDIVAYGGYAFAGLCLAGFAKIMWGYSYYALMPWTCLCTGIFLVKTMKRVLFAEVRSYDSSKHHYLLLFLALVQFPLLIWLGNISVNWLL

SEQ ID NO: 31763 - DNA, 1194 bp, Arabidopsis thaliana
  misc_feature (1)..(1194): Ceres Seq. ID no. 13588747
gatccctcgtaactcctatagaaaaacagaagtaaaacaaaaataaaataaaaacacaaagatggagtgctatgagcagagtcgtcagagagctgcgttcgttgtgctgttgtttatcgttatgttgggatcccaggcacaggcccaactacgcactgacttctattcggacagctgtccatcactgctccctacggtgaggcgggtggtgcagcgagaggtggccaaagagcgtcggatagctgcttccctcctccgactattcttccatgattgcttcgtcaacggctgtgatgcgtcaatattattggatgatacacgttcattcctcggagaaaagacggctggacctaacaataattccgttcgaggatatgaagtcatcgacgcaatcaaatcaagggttgagagactctgcccaggcgtggtgtcatgcgctgacatcctggcaatcacggctcgggactcggtccttctaatgggtggccgcggctggagcgtaaaactagggagacgtgattctatcacggcgagcttctccactgctaactccggcgtcctgccacctccaacctctactcttgataaccttattaaccttttccgagcaaacggtttatccccacgcgacatggtggcgctctccggggctcacaccattgggcaagccaggtgcgtcaccttcaggagccggatatataactcaacaaacatcgacctttcatttgccttatccagacggaggagctgccctgcggcaactggctccggcgataacaacgccgccattctcgatctccgcacacctgaaaagttcgacggcagctacttcatgcagcttgtcaaccacaggggacttctcacatcagatcaggtcttgttcaacggaggttccaccgactcgatcgtcgtatcctacagccggagtgtccaagcattctacagagattttgtagcggcgatgataaaaatgggcgacatcagcccactcaccgggtccaatggacagatccgtcgcagctgtcgcaggcccaactaaaatagtctctactattaagcccataataatctcttagtgaactgtttttttcttattttaatgtgcatcattctgatgttattgcgatatgtcaattaattaaaccggaaatatctattgtttaatcgatataatatataatataattaagtaac

SEQ ID NO: 31764 - protein, 325 aa, Arabidopsis thaliana
  misc_feature (1)..(325): Ceres Seq. ID no. 13588748
MECYEQSRQRAAFVVLLFIVMLGSQAQAQLRTDFYSDSCPSLLPTVRRVVQREVAKERRIAASLLRLFFHDCFVNGCDASILLDDTRSFLGEKTAGPNNNSVRGYEVIDAIKSRVERLCPGVVSCADILAITARDSVLLMGGRGWSVKLGRRDSITASFSTANSGVLPPPTSTLDNLINLFRANGLSPRDMVALSGAHTIGQARCVTFRSRIYNSTNIDLSFALSRRRSCPAATGSGDNNAAILDLRTPEKFDGSYFMQLVNHRGLLTSDQVLFNGGSTDSIVVSYSRSVQAFYRDFVAAMIKMGDISPLTGSNGQIRRSCRRPN

SEQ ID NO: 31765 - protein, 305 aa, Arabidopsis thaliana
  misc_feature (1)..(305): Ceres Seq. ID no. 13588749
MLGSQAQAQLRTDFYSDSCPSLLPTVRRVVQREVAKERRIAASLLRLFFHDCFVNGCDASILLDDTRSFLGEKTAGPNNNSVRGYEVIDAIKSRVERLCPGVVSCADILAITARDSVLLMGGRGWSVKLGRRDSITASFSTANSGVLPPPTSTLDNLINLFRANGLSPRDMVALSGAHTIGQARCVTFRSRIYNSTNIDLSFALSRRRSCPAATGSGDNNAAILDLRTPEKFDGSYFMQLVNHRGLLTSDQVLFNGGSTDSIVVSYSRSVQAFYRDFVAAMIKMGDISPLTGSNGQIRRSCRRPN

SEQ ID NO: 31766 - protein, 186 aa, Arabidopsis thaliana
  misc_feature (1)..(186): Ceres Seq. ID no. 13588750
MGGRGWSVKLGRRDSITASFSTANSGVLPPPTSTLDNLINLFRANGLSPRDMVALSGAHTIGQARCVTFRSRIYNSTNIDLSFALSRRRSCPAATGSGDNNAAILDLRTPEKFDGSYFMQLVNHRGLLTSDQVLFNGGSTDSIVVSYSRSVQAFYRDFVAAMIKMGDISPLTGSNGQIRRSCRRPN

SEQ ID NO: 31767 - DNA, 1413 bp, Arabidopsis thaliana
  misc_feature (1)..(1413): Ceres Seq. ID no. 13588758
atggagacaagaaaagacgacatggagaaaaggaacgacaaatccgagccgttgctgctgccggagaatggatccgacgtctcagaagaagcatcatggatggtttatctaagcacgatcattgccgtttgcggttcctacgagtttggaacatgcgtgggatactccgctccaacacagtttgggattatggaagagcttaatttatcatattcccagttttcggttttcggatcgatattgaatatgggagcagtgctcggcgccattacatcggggaagatttctgatttcatcggtcggaaaggggccatgcggttgtcttcagtgatctctgccatcggctggctgataatttacttggccaagggtaacgtacctttggatttcggaagatttctaacgggttatggttgcggtaccctttcctttgtggtaccggtcttcatcgccgaaattagtccgagaaaattgagaggagccttagcgacgcttaaccagctctttatcgtaatcggattagcttctatgttcctcataggcgccgttgtaaattggagaactcttgcactaaccggagttgcaccgtgcgtggttctattctttgggacttggttcatccctgaatcacccagatggctggaaatggttggccgccacagtgattttgaaattgcgttgcaaaaactgaggggtcctcaggccaatatcacaagagaagccggggaaattcaggagtacttagcgagtcttgctcacctcccgaaagccacattgatggaccttattgacaaaaagaatattcgatttgtgatagttggagttggtttgatgtttttccaacaattcgttggaattaatggcgttatcttctacgcacaacaaatattcgtatcagcaggagcatccccaactcttggaagcattctatactcgatcgaacaagtcgttctcacagcactaggcgcaacattgctaattgatcggcttggaagaaggccacttcttatggcttcagctgttgggatgctgattggatgtttgctcatcggaaattcatttcttttgaaggctcatggtttagcacttgacatcattccggctctggcagttagtggtgtcttggtctacatcggttcgttctctattggaatgggtgcaatcccatgggttataatgtctgagatatttccaataaatttgaaaggaactgccggaggacttgtcactgtagtaaattggctaagttcatggcttgtctcattcactttcaactttctcatgatttggagccctcatggtacattttatgtgtatggtggggtatgtgtattggctattatcttcatagcaaaacttgttcctgaaactaaaggcagaaccttggaagagattcaagcaatgatgatgtaa

SEQ ID NO: 31768 - protein, 470 aa, Arabidopsis thaliana
  misc_feature (1)..(470): Ceres Seq. ID no. 13588759
METRKDDMEKRNDKSEPLLLPENGSDVSEEASWMVYLSTIIAVCGSYEFGTCVGYSAPTQFGIMEELNLSYSQFSVFGSILNMGAVLGAITSGKISDFIGRKGAMRLSSVISAIGWLIIYLAKGNVPLDFGRFLTGYGCGTLSFVVPVFIAEISPRKLRGALATLNQLFIVIGLASMFLIGAVVNWRTLALTGVAPCVVLFFGTWFIPESPRWLEMVGRHSDFEIALQKLRGPQANITREAGEIQEYLASLAHLPKATLMDLIDKKNIRFVIVGVGLMFFQQFVGINGVIFYAQQIFVSAGASPTLGSILYSIEQVVLTALGATLLIDRLGRRPLLMASAVGMLIGCLLIGNSFLLKAHGLALDIIPALAVSGVLVYIGSFSIGMGAIPWVIMSEIFPINLKGTAGGLVTVVNWLSSWLVSFTFNFLMIWSPHGTFYVYGGVCVLAIIFIAKLVPETKGRTLEEIQAMMM

SEQ ID NO: 31769 - protein, 463 aa, Arabidopsis thaliana
  misc_feature (1)..(463): Ceres Seq. ID no. 13588760
MEKRNDKSEPLLLPENGSDVSEEASWMVYLSTIIAVCGSYEFGTCVGYSAPTQFGIMEELNLSYSQFSVFGSILNMGAVLGAITSGKISDFIGRKGAMRLSSVISAIGWLIIYLAKGNVPLDFGRFLTGYGCGTLSFVVPVFIAEISPRKLRGALATLNQLFIVIGLASMFLIGAVVNWRTLALTGVAPCVVLFFGTWFIPESPRWLEMVGRHSDFEIALQKLRGPQANITREAGEIQEYLASLAHLPKATLMDLIDKKNIRFVIVGVGLMFFQQFVGINGVIFYAQQIFVSAGASPTLGSILYSIEQVVLTALGATLLIDRLGRRPLLMASAVGMLIGCLLIGNSFLLKAHGLALDIIPALAVSGVLVYIGSFSIGMGAIPWVIMSEIFPINLKGTAGGLVTVVNWLSSWLVSFTFNFLMIWSPHGTFYVYGGVCVLAIIFIAKLVPETKGRTLEEIQAMMM

SEQ ID NO: 31770 - protein, 437 aa, Arabidopsis thaliana
  misc_feature (1)..(437): Ceres Seq. ID no. 13588761
MVYLSTIIAVCGSYEFGTCVGYSAPTQFGIMEELNLSYSQFSVFGSILNMGAVLGAITSGKISDFIGRKGAMRLSSVISAIGWLIIYLAKGNVPLDFGRFLTGYGCGTLSFVVPVFIAEISPRKLRGALATLNQLFIVIGLASMFLIGAVVNWRTLALTGVAPCVVLFFGTWFIPESPRWLEMVGRHSDFEIALQKLRGPQANITREAGEIQEYLASLAHLPKATLMDLIDKKNIRFVIVGVGLMFFQQFVGINGVIFYAQQIFVSAGASPTLGSILYSIEQVVLTALGATLLIDRLGRRPLLMASAVGMLIGCLLIGNSFLLKAHGLALDIIPALAVSGVLVYIGSFSIGMGAIPWVIMSEIFPINLKGTAGGLVTVVNWLSSWLVSFTFNFLMIWSPHGTFYVYGGVCVLAIIFIAKLVPETKGRTLEEIQAMMM

SEQ ID NO: 31771 - DNA, 3165 bp, Arabidopsis thaliana
  misc_feature (1)..(3165): Ceres Seq. ID no. 13588774
atgggttcagagtataagcatatattgaagagtctctgtttaagccatggatggtcttatgctgtgttttggcgttatgatcccatcaattccatgatattgagatttgaagaagcatacaatgatgaacaatcagtcgcactagttgatgatatggttctccaggctcctatcttaggccaaggaattgtgggagaagtagcttcatccggaaaccatcaatggctgttctcagacacattgtttcagtgggaacatgagtttcagaatcagtttctctgtggctttaagattcttatacggcagtttacttatacacagactatcgcaatcattccactaggatccagcggcgttgttcagctaggatctactcaaaagattcttgagagcacagagatattggaacaaacaacaagagctctccaggagacgtgtttaaagccacatgattccggtgatctcgatactctgtttgagtcactgggagattgtgagattttcccagctgaatcttttcaaggatttagctttgatgacatcttcgctgaggacaatcctccttctttgctcagccctgagatgatctcctctgaagcagcttcttccaaccaagatctgaccaatggagatgattatgggttcgacattctccagtcttactctctggacgatctataccagctgctcgctgatccaccagaacagaactgctcttccatggtgatccaaggagttgacaaggatcttttcgacattttggggatgaattctcaaacgcctacaatggctttgccacctaaaggactcttctcagagctcataagcagcagtcttagcaacaacacttgtagtagttctctcacgaacgtgcaagagtactctggtgtgaaccagagcaaaagacggaagcttgatacatcatcggcgcatagctcaagcttgttccctcaggaggagacagtaacaagtcggagtttgtggattgatgatgatgagagatcaagtattggagggaactggaagaagcctcacgaagaaggtgtgaagaagaaaagagcaaaggcaggagaaagcaggaggccgaggcctaaggaccgtcagatgatacaagaccgtatcaaggagttgcgagggatgattccaaatggagctaagtgtagcatagatacgttgctggatctgaccataaaacacatggtgttcatgcaaagcctcgccaagtatgcagagagactcaaacaaccatacgagtctaagctggtgaaggagaaagagagaacatgggcgttggaagtgggggaagaaggagtggtatgtccgataatggtggaggaattgaacagggaaggagaaatgcagatagagatggtgtgtgaggaaagagaggagttcttggagataggacaagtggtgagaggattgggattgaagatattgaaaggagtgatggaaacaagaaaaggacaaatatgggcacacttcatcgtacaggcaaagccacaagtcacaaggattcaagtcttgttagaatatctgccatggaagaggctgacttcgtccagaaagatcccactggtcgctacattaggtataatgacgttctcgggagaggagccttcaaaactgtgtatgtttgtttgtttatacgtcctttactttttcattgcagtgcctatatataaggcatttgatgaagtcgaaggtattgaagttgcttggaacctcatgagcattgaagatgtcttgcagatgcctggccaacttgataggctatattccgaagtccatctcctcaattcccttaaacatgataacatcatcaaactcttctactcttgggttgatgatcataacaagtccatcaacatgatcactgagcttttcacctctggtagtctcaccctttatcgcaagaagcaccgcaaagttgatcccaaggccatcatgaactgggcaaggcagattcttaaaggcctgcactatttgcattctcagacccctcctgtaattcaccgtgaccttaagtgcgacaatatttttgtcaatggaaataccggaaaggtcaaaattggagatcttgggctcgctgctgtgatgcagcaacccactgctcgaagtgtgattggcactcctgaattcatggcgcccgagctttatgaagaagaatatactgaacttgtcgacatctattcttttggcatgtgcatgttggagatggtaacatgtgaatatccatacagagaatgcagaaaccaggctcaaatatacaagaaggttacctcgggtataaaacctcaatctctcagcaaagttgatgatcctcaagttaagcaattcatagagaagtgtcttctcccagctccttctagaccaactgctctagagctcctgaaggaccaactccttgcagtagatggcgccaaggactccactcttactgcttcatcaaacacaacattcaaacctgcaatgccaccacagtgtgaatatcgtcctatggatgttgaatataagaagaatacaagtgtttccatctgctcttctgctaaaagcagccaagaatgcgcattgctccagaccatggaagtccagagggttgctgaaagtaccgaattcaagctgagtggagagaggagagatgatgtggcagcatcaatggctctgcggatcgcgggctcatctggtcaagcgagaaaagttgattttgacttcaatctgaagacagacacagcaagagcagttacaggggagatggttgaagagcttgatctgtcaagccatgaggttactgtgatagctgagatgatagatgaactgataatgaagctgaaggctaatcgaagcctgcctaatgcaaacagtgtatatcagtccaaggatgaagaagctggagaatcaatgaagtcagagatatcagcggactactaccatcgggtctcctcaaacgaggggtcacggctcggctgctgctgcgaggcagtagagtcattgttgtcctcgtttctggattcatgctcaatggtgtcaaacaagcagtcggaggatctgaagacggagctgaatgtgatagagtcacaatataaccaatcgtgtcaacgactgcttagaatgaaagaggaagctatagagaaggcgaaacggaagtggatgaagctgagttga

SEQ ID NO: 31772 - protein, 1054 aa, Arabidopsis thaliana
  misc_feature (1)..(1054): Ceres Seq. ID no. 13588775
MGSEYKHILKSLCLSHGWSYAVFWRYDPINSMILRFEEAYNDEQSVALVDDMVLQAPILGQGIVGEVASSGNHQWLFSDTLFQWEHEFQNQFLCGFKILIRQFTYTQTIAIIPLGSSGVVQLGSTQKILESTEILEQTTRALQETCLKPHDSGDLDTLFESLGDCEIFPAESFQGFSFDDIFAEDNPPSLLSPEMISSEAASSNQDLTNGDDYGFDILQSYSLDDLYQLLADPPEQNCSSMVIQGVDKDLFDILGMNSQTPTMALPPKGLFSELISSSLSNNTCSSSLTNVQEYSGVNQSKRRKLDTSSAHSSSLFPQEETVTSRSLWIDDDERSSIGGNWKKPHEEGVKKKRAKAGESRRPRPKDRQMIQDRIKELRGMIPNGAKCSIDTLLDLTIKHMVFMQSLAKYAERLKQPYESKLVKEKERTWALEVGEEGVVCPIMVEELNREGEMQIEMVCEEREEFLEIGQVVRGLGLKILKGVMETRKGQIWAHFIVQAKPQVTRIQVLLEYLPWKRLTSSRKIPLVATLGIMTFSGEEPSKLCMFVCLYVLYFFIAVPIYKAFDEVEGIEVAWNLMSIEDVLQMPGQLDRLYSEVHLLNSLKHDNIIKLFYSWVDDHNKSINMITELFTSGSLTLYRKKHRKVDPKAIMNWARQILKGLHYLHSQTPPVIHRDLKCDNIFVNGNTGKVKIGDLGLAAVMQQPTARSVIGTPEFMAPELYEEEYTELVDIYSFGMCMLEMVTCEYPYRECRNQAQIYKKVTSGIKPQSLSKVDDPQVKQFIEKCLLPAPSRPTALELLKDQLLAVDGAKDSTLTASSNTTFKPAMPPQCEYRPMDVEYKKNTSVSICSSAKSSQECALLQTMEVQRVAESTEFKLSGERRDDVAASMALRIAGSSGQARKVDFDFNLKTDTARAVTGEMVEELDLSSHEVTVIAEMIDELIMKLKANRSLPNANSVYQSKDEEAGESMKSEISADYYHRVSSNEGSRLGCCCEAVESLLSSFLDSCSMVSNKQSEDLKTELNVIESQYNQSCQRLLRMKEEAIEKAKRKWMKLS

SEQ ID NO: 31773 - protein, 1023 aa, Arabidopsis thaliana
  misc_feature (1)..(1023): Ceres Seq. ID no. 13588776
MILRFEEAYNDEQSVALVDDMVLQAPILGQGIVGEVASSGNHQWLFSDTLFQWEHEFQNQFLCGFKILIRQFTYTQTIAIIPLGSSGVVQLGSTQKILESTEILEQTTRALQETCLKPHDSGDLDTLFESLGDCEIFPAESFQGFSFDDIFAEDNPPSLLSPEMISSEAASSNQDLTNGDDYGFDILQSYSLDDLYQLLADPPEQNCSSMVIQGVDKDLFDILGMNSQTPTMALPPKGLFSELISSSLSNNTCSSSLTNVQEYSGVNQSKRRKLDTSSAHSSSLFPQEETVTSRSLWIDDDERSSIGGNWKKPHEEGVKKKRAKAGESRRPRPKDRQMIQDRIKELRGMIPNGAKCSIDTLLDLTIKHMVFMQSLAKYAERLKQPYESKLVKEKERTWALEVGEEGVVCPIMVEELNREGEMQIEMVCEEREEFLEIGQVVRGLGLKILKGVMETRKGQIWAHFIVQAKPQVTRIQVLLEYLPWKRLTSSRKIPLVATLGIMTFSGEEPSKLCMFVCLYVLYFFIAVPIYKAFDEVEGIEVAWNLMSIEDVLQMPGQLDRLYSEVHLLNSLKHDNIIKLFYSWVDDHNKSINMITELFTSGSLTLYRKKHRKVDPKAIMNWARQILKGLHYLHSQTPPVIHRDLKCDNIFVNGNTGKVKIGDLGLAAVMQQPTARSVIGTPEFMAPELYEEEYTELVDIYSFGMCMLEMVTCEYPYRECRNQAQIYKKVTSGIKPQSLSKVDDPQVKQFIEKCLLPAPSRPTALELLKDQLLAVDGAKDSTLTASSNTTFKPAMPPQCEYRPMDVEYKKNTSVSICSSAKSSQECALLQTMEVQRVAESTEFKLSGERRDDVAASMALRIAGSSGQARKVDFDFNLKTDTARAVTGEMVEELDLSSHEVTVIAEMIDELIMKLKANRSLPNANSVYQSKDEEAGESMKSEISADYYHRVSSNEGSRLGCCCEAVESLLSSFLDSCSMVSNKQSEDLKTELNVIESQYNQSCQRLLRMKEEAIEKAKRKWMKLS

SEQ ID NO: 31774 - protein, 1003 aa, Arabidopsis thaliana
  misc_feature (1)..(1003): Ceres Seq. ID no. 13588777
MVLQAPILGQGIVGEVASSGNHQWLFSDTLFQWEHEFQNQFLCGFKILIRQFTYTQTIAIIPLGSSGVVQLGSTQKILESTEILEQTTRALQETCLKPHDSGDLDTLFESLGDCEIFPAESFQGFSFDDIFAEDNPPSLLSPEMISSEAASSNQDLTNGDDYGFDILQSYSLDDLYQLLADPPEQNCSSMVIQGVDKDLFDILGMNSQTPTMALPPKGLFSELISSSLSNNTCSSSLTNVQEYSGVNQSKRRKLDTSSAHSSSLFPQEETVTSRSLWIDDDERSSIGGNWKKPHEEGVKKKRAKAGESRRPRPKDRQMIQDRIKELRGMIPNGAKCSIDTLLDLTIKHMVFMQSLAKYAERLKQPYESKLVKEKERTWALEVGEEGVVCPIMVEELNREGEMQIEMVCEEREEFLEIGQVVRGLGLKILKGVMETRKGQIWAHFIVQAKPQVTRIQVLLEYLPWKRLTSSRKIPLVATLGIMTFSGEEPSKLCMFVCLYVLYFFIAVPIYKAFDEVEGIEVAWNLMSIEDVLQMPGQLDRLYSEVHLLNSLKHDNIIKLFYSWVDDHNKSINMITELFTSGSLTLYRKKHRKVDPKAIMNWARQILKGLHYLHSQTPPVIHRDLKCDNIFVNGNTGKVKIGDLGLAAVMQQPTARSVIGTPEFMAPELYEEEYTELVDIYSFGMCMLEMVTCEYPYRECRNQAQIYKKVTSGIKPQSLSKVDDPQVKQFIEKCLLPAPSRPTALELLKDQLLAVDGAKDSTLTASSNTTFKPAMPPQCEYRPMDVEYKKNTSVSICSSAKSSQECALLQTMEVQRVAESTEFKLSGERRDDVAASMALRIAGSSGQARKVDFDFNLKTDTARAVTGEMVEELDLSSHEVTVIAEMIDELIMKLKANRSLPNANSVYQSKDEEAGESMKSEISADYYHRVSSNEGSRLGCCCEAVESLLSSFLDSCSMVSNKQSEDLKTELNVIESQYNQSCQRLLRMKEEAIEKAKRKWMKLS

SEQ ID NO: 31775 - DNA, 7869 bp, Arabidopsis thaliana
  misc_feature (1)..(7869): Ceres Seq. ID no. 13588786
atggattccgtctctagaggtgccgttgcttcaacaaccggcggtgctgtggaagagccggagtatctagctaggtatcttgttgttaaacattcatggagaggtcgttataagaggatcctttgtatttcgagcggcggaattgttacgcttgatcctaatactcttgctgttactaattcttatgatactggaagtaattttgatggtgcttcacctctggttggaagagatgagaacacggagagtgttggtggtgagtttactgtcaatgttagaacggatgggaaagggaaatttaaggctatgaagttctcttctaggtgcagagcgagtattttgaccgagttgtatcggcttagatggaatcaaattagacctgtggctgagtttcaggtgctacatcttaggagacggaacgcagaatgggttccttataaattgaagatcacctttgtcggtctggagcttgtcgactcaaaatctggtaattcacgctggattttggatttcagagacatgggttccccagcaatcattcttctctctgatgcataccggacaaaatctgcggactctgctgggtttgttctgtgtcccatgtatgggagaaagtcaaaagcttttagagctgcacccgggacaacaaattcctccattgtcgcaagtttggctaagactgcaaagtccatggttggggtattcttgtcagtcgatgattcacaattgctgacagtatcagagtatatgacacgaagggctaaagaagcagttggagctgaagaaactcctaatgggtggtggtctgttactagattaagatctgctgctcatggaactctgaacatgcctggactaagcttagcaattggccccaaaggaggacttggtgagcatggggatgctgtagcccttcagcttattcttactaaggcctcccttgttgagagacgaatagataactatgaagttgttatcgttcgtcctctatcttcagtaagttcacttgtccggttcgctgaggaaccccaaatgtttgctatcgaattcagtgatggatgtccagttcttggacactgcccgataccagtattaccaaggcttactatgcctggtcatcgcattgatccaccttgtggaagggttagtttgatctctggaccacaacatcttgttgctgatttggaaacttgctccctacatctgaaacatttagctgctgctgcaaaagatgcagttgccgaaggtggttctgttcctggttgtagggctagattatggcgcagaataagggagttcaatgcttgtatcccgtatacaggtgtgcccgctaatagtgaagtccctgaggtgactttgatggcattaattacaatgctaccatcaactccaaatctccctgtagacgcccctcctttgccacctccttcacccaaagcagcagcaactgtcattggctttgttacatgtttgcgtaggttattgtcatccaggagtgcagcatcccatataatgtcattccctgctgctgttaacaggataatgggtttacttaggaacggttctgaaggtgtagctgctgaagctgcggggcttattgcgtccctcataggcggttggtcagcagatctgagcactgcaccagattccagaggagaaaaacatgcaactatcatgcataccaagtctgttttgtttgctcaacagggttatgttactattctggtcaatcgattgaaacccatgtcagtctcacctctgttttccatggcgattgttgaagtctttgaggctatggtttgtgatccacacggagagactacccaatacactgtttttgtagaattgttacgacagatagctgccctacgacgtcgtttatttgcactctttgcacatcctgcagagagtgttagggaaaccattgctgttatcatgcgtacaatagctgaagaagatgcaattgctgcagagtcaatgcgtgatgctgctttgcgcgatggtgctttgttgagacatttattgaatgcattttcccttcctgccagtgagcggcgcgaggtaagtaggcagcttgtggcactctgggcagattcttaccaaccagctttggatctactgtctcgagttctgcctcctgggcttgttgcatatttgcatacacgtcccgatgatgttgtcgatgatacagatcaagaaggttcttcaacaaataggcggcagaaaagattacttcagcagagaagaggtcgcatagctaagggaatgggtgctcaagatattcctcttccccctggtaataatgttgaggctggcgatgcagcaaaacatatgagtgcaaatgctagtgtacccgataactttcaaaggcgggcagcagattcttcctctgaagcttccaatcctcaggcttctgcttttccaggtgttgacagtactattgcaggggtttcacaaaatggctatccagcatttgcttcagtcaccacaaatgcaaatgggcatgagcaacctgagactaatgcatccgatgtggttggttctgacccaaacttgtatggcatccagaattcagtgcttccagcacctgctcaagttattgtagaaagtacagctgtaggatccggaaagctacttctaaattggcgtgagttttggcgagcctttggccttgatcataatcgtgcagatctcatctggaatgagcgtacaaggcaagaattaatagaagctttgaaggctgaagtccacaacctagatgtcgagaaagagcgcacagaagatatttcccctggtgatgtcgaggccacaactggccaggagattatcccacgtatatcttggaactattctgaattctctgtcagttatcgtagcttatcaaaagaagtttgtgtgggccagtattacctacgcttattgcttgaaagtggcaacgctggcaaggcacaagatttccctctccgtgatccagttgcttttttcagggcactctatcatcgtttccagtgtgatgctgatatggggcttactattgatggtgctgttccagatgaattgggttcatcaggcgactggtgtgatatgagtaggcttgatggttttggtggagggggaggagcttctgttagggagctttgtgcaagagcaatggcgattgtctatgagcaacactacaacacaataggtccttttgaaggcactgcacatattacagcactgattgataggacgaatgatagagctttgaggcatcgcctactacttctcctaaaggccctagttaaggtcttgttaaacgtcgaaggttgtgttgtggttggtggttgtgtcctagctgtagatctgctgactgttgttcatgaaaactcggagaggactcctattccattacagtccaatttaattgctgctactgcatttatggaaccacctaaggaatggatgtacatagacaaaggtggtgcagaagtgggacctgtagagaaggacgtcatcagaagtttatggtccaaaaaggatattgactggacgacaaagtgtcgggctttaggaatgtcagactggaagaaattgcgtgatatccgtgaacttagatgggcagtagctgttcgagttccagtcctcacacctagtcaggtaggggatgctgcattgtccatattacatagcatggtttcggcacattcagatttggatgacgctggagagattgtaactccaacaccaagagtaaaacgtatcttgtctagtacacgttgtcttcctcacattgctcaggctttgctatctggcgaaccagttattgtggaggctggtgctgctctcttgaaagacgttgttaccagaaactctaaggcaatgatccgactgtacagtacaggggccttttactttgcccttgcttaccctggatctaatctttactcaatcgcacaactcttctcggtcacccatgtccatcaagctttccatggtggggaagaagctactgtttcctcctctctgcccctggctaaacgaagcgtattgggtggtcttctcccagagtccttactatatgtattagagcgcagtggaccagctgcgtttgcagctggcatggtttctgattccgatacgccggagattatatggacacataaaatgcgagcagaaaatcttatatgtcaggttttgcagcatcttggtgattatcctcagaaattgtcacagcactgccattctctctatgattatgctcccatgccacctgttacgtatccagaacttagagatgagatgtggtgtcaccgttattatctcagaaatttatgtgatgagattcaatttcctaattggccgattgttgaacatgttgagttcttacaatcattacttgtgatgtggcgtgaagagttgactaggaaacccatggatctttctgaaggagaagcttgcaaaattctagaaatatccctgaacaatgtatcaagtgatgacctaaaccggactgcttcagttgagttgaatgaggaaatatctaatatatccaaacaaattcaaaaccttgatgaagagaaactaaagcgccagtataggaagcttgcaatgaggtaccatcctgacaagaatccagaaggaagagaaaagttcctggctgttcaaaaagcttatgaatgcctacaggcaacaatgcaaggattgcaaggtcctcagccgtggaggttgctgcttttactgaaagcgcagtgcatcttatatcgccgttatggacatgtgttacgaccgttcaaatatgctggctatccgatgttacttgatgcagttacagtggacaaggatgacaacaactttctatctaatgatagatcccctcttcttgttgcagcatctgagcttgtttcgttaacctgtgctgcctcgtcattgaatggtgaagaattagtgagagatggtggtgtgcagcttctatcaactcttctttcccgctgcatgtgtgtggttcagccaacaacttcacaacacgaaccagctgcgatcattgtcacaaatgtaatgcgtacactttcggtaataagtcagtttgagagtgcgagggctggatttctagagttacccagtctgattgaagacattgtgcactgtacggaattagaacgtgtgcctgcagccgttgatgctgctctccagtccattgccaaggtttctgtcttccccgaacttcagcatggtctgctaaaggctggtgccttatggtatattctcccattattactacagtatgactcaactgctgaggaatctaattctgtcgagtctcatggggttggagttagcattcaaattgccaagaatgagcatgccttacaagcatcacaagccctatcaaggcttactgggctgtgtgcagatgagagtttgacaccttacaatgctactgcggctgatgttctcaaagcattactgacgccaaaacttgctagtttgttgaaagatgaagttgccaaggatttgttatccaaactgaacacaaatttggagacaccagagattatctggaactctgcaactcgatcagagcttttaaattttgtggatgaacaacgcgcctgccagtgccctgatggttcatatgatctgaaaaatgctcaatctttttcgtatgacgcactgtcaaaagaggtctttgttggcaatgtttacttgaaggtctataatgatcaacccgactcagagatcagtgaaccagaatcattctgcaatgccctaatcgactttatatcatcattagtgcatactgagttgccctctgtttccgaggaccaaaatttgatcgaagacagaaactcatctaatgatactccagagcttcaaagtagcgtcgcagaaccgtcgttgattgaagaacattccgatcatcagccatcatctgaggggatgaagaacgaagaatgttttctgattgatcacctccaattaggattgactgctcttcagaacttgcttacaaagtatccagatctggcttcagtgttttcgtctaaggagagattgttacctctctttgaatgtttttctgtggccattgcatcaaaaacagatattccaaaactctgcctcaatgtcctctctcggttaacagcttatgctccttgcttggagacgatggtatctgatggatctagtcttcttctcctcttacaaatgcttcattctgcaccttcttttcgcgagggtgctctccatgttctttatgctttggcaagcacaccagaacttgcttgggctgctgcaaaacatgaagaaattcccttgcagcaaagagctgcagcggcttctttgttggggaagctcgtcgcacaaccaatgcatgggcctagagttgctatcacacttgtgagattccttcctgacggtcttgtatctataattcgtgatggacctggggaggctgttgtccatgcacttgagcggaccactgagactccagaacttgtgtggacaccagcaatggcagcatctttatccgcacagattgcaaccatggcatcagatatttatcgtgaacaacagaagggttctgttattgaatgggatgtaccagagcagtcagctggtcaacaagaaatgagagacgagccacaggttggtggaatctatgtcaggcgtttcttaaaagatccaaaatttcctctgagaaatccaaaacgattcttggaaggactgctggatcagtatttgtcagcaatggccgcaacacattacgaacaacatcctgttgaccctgagctccctctccttctctctgctgcattggtttctttgttgcgtgtgcatcctgcacttgcagatcacattggacatcttgggtatgtcccaaaacttgtcgctgctgtggcatatgaggggaggcgggaaacaatgtcttctggcgaagtgaaggctgaagaaattggctctgatggagtgaatgagtctactgatccctcaagtctacctgggcaaacccctcaagaacgtgtgcgccttagttgtttacgtgtgcttcatcaacttgcagctagtaccacatgtgctgaagcaatggctgcaactagtgctggaaatgcacaggtggttccacttctcatgaaagcaataggatggcttggtggaagcattttagcactcgagacacttaagcgtgttgttgttgctggaaatcgggccagagatgcgcttgttgcgcagggtctaaaggttggtctcattgaggttcttcttgggctgcttgactggaggacggggggtaggtatgggctcagttctcacatgaaatggaatgaatcggaagcatcaatcgggcgggtacttgcagttgaggttagtgttgaatttgttagcgagatgtttgttatgtgtgttacacatgtattgcatggttttgcaacagaaggagcacattgctcaaaagtgcgtgagatacttgacgcgtcagaagtgtggagtgcatataaagaccaaaagcatgacttgttcctgccatcaaacacacaatcagcggcaggggtggctggctttattgagaactcatccaacagtctcacttacgctcttaccgctcctcctccgccttcgcatccttgaccatttcttccttgtatatccttttgtaaagtccaatcattaccgtgctttttttttttctttctatagagaaatactgtcgtttgtaaatgtttgatgagaaagtagaaaatatttgtggtttccttggaccaacaatgaaaactacggtctgatgacaggatttgtagttgttgggtcgtagacgatatccaaacaacttgtccctttatattttgggattaaacttgttgcttattaagtcaattttctccattatcc

SEQ ID NO: 31776 - protein, 2535 aa, Arabidopsis thaliana
  misc_feature (1)..(2535): Ceres Seq. ID no. 13588787
MDSVSRGAVASTTGGAVEEPEYLARYLVVKHSWRGRYKRILCISSGGIVTLDPNTLAVTNSYDTGSNFDGASPLVGRDENTESVGGEFTVNVRTDGKGKFKAMKFSSRCRASILTELYRLRWNQIRPVAEFQVLHLRRRNAEWVPYKLKITFVGLELVDSKSGNSRWILDFRDMGSPAIILLSDAYRTKSADSAGFVLCPMYGRKSKAFRAAPGTTNSSIVASLAKTAKSMVGVFLSVDDSQLLTVSEYMTRRAKEAVGAEETPNGWWSVTRLRSAAHGTLNMPGLSLAIGPKGGLGEHGDAVALQLILTKASLVERRIDNYEVVIVRPLSSVSSLVRFAEEPQMFAIEFSDGCPVLGHCPIPVLPRLTMPGHRIDPPCGRVSLISGPQHLVADLETCSLHLKHLAAAAKDAVAEGGSVPGCRARLWRRIREFNACIPYTGVPANSEVPEVTLMALITMLPSTPNLPVDAPPLPPPSPKAAATVIGFVTCLRRLLSSRSAASHIMSFPAAVNRIMGLLRNGSEGVAAEAAGLIASLIGGWSADLSTAPDSRGEKHATIMHTKSVLFAQQGYVTILVNRLKPMSVSPLFSMAIVEVFEAMVCDPHGETTQYTVFVELLRQIAALRRRLFALFAHPAESVRETIAVIMRTIAEEDAIAAESMRDAALRDGALLRHLLNAFSLPASERREVSRQLVALWADSYQPALDLLSRVLPPGLVAYLHTRPDDVVDDTDQEGSSTNRRQKRLLQQRRGRIAKGMGAQDIPLPPGNNVEAGDAAKHMSANASVPDNFQRRAADSSSEASNPQASAFPGVDSTIAGVSQNGYPAFASVTTNANGHEQPETNASDVVGSDPNLYGIQNSVLPAPAQVIVESTAVGSGKLLLNWREFWRAFGLDHNRADLIWNERTRQELIEALKAEVHNLDVEKERTEDISPGDVEATTGQEIIPRISWNYSEFSVSYRSLSKEVCVGQYYLRLLLESGNAGKAQDFPLRDPVAFFRALYHRFQCDADMGLTIDGAVPDELGSSGDWCDMSRLDGFGGGGGASVRELCARAMAIVYEQHYNTIGPFEGTAHITALIDRTNDRALRHRLLLLLKALVKVLLNVEGCVVVGGCVLAVDLLTVVHENSERTPIPLQSNLIAATAFMEPPKEWMYIDKGGAEVGPVEKDVIRSLWSKKDIDWTTKCRALGMSDWKKLRDIRELRWAVAVRVPVLTPSQVGDAALSILHSMVSAHSDLDDAGEIVTPTPRVKRILSSTRCLPHIAQALLSGEPVIVEAGAALLKDVVTRNSKAMIRLYSTGAFYFALAYPGSNLYSIAQLFSVTHVHQAFHGGEEATVSSSLPLAKRSVLGGLLPESLLYVLERSGPAAFAAGMVSDSDTPEIIWTHKMRAENLICQVLQHLGDYPQKLSQHCHSLYDYAPMPPVTYPELRDEMWCHRYYLRNLCDEIQFPNWPIVEHVEFLQSLLVMWREELTRKPMDLSEGEACKILEISLNNVSSDDLNRTASVELNEEISNISKQIQNLDEEKLKRQYRKLAMRYHPDKNPEGREKFLAVQKAYECLQATMQGLQGPQPWRLLLLLKAQCILYRRYGHVLRPFKYAGYPMLLDAVTVDKDDNNFLSNDRSPLLVAASELVSLTCAASSLNGEELVRDGGVQLLSTLLSRCMCVVQPTTSQHEPAAIIVTNVMRTLSVISQFESARAGFLELPSLIEDIVHCTELERVPAAVDAALQSIAKVSVFPELQHGLLKAGALWYILPLLLQYDSTAEESNSVESHGVGVSIQIAKNEHALQASQALSRLTGLCADESLTPYNATAADVLKALLTPKLASLLKDEVAKDLLSKLNTNLETPEIIWNSATRSELLNFVDEQRACQCPDGSYDLKNAQSFSYDALSKEVFVGNVYLKVYNDQPDSEISEPESFCNALIDFISSLVHTELPSVSEDQNLIEDRNSSNDTPELQSSVAEPSLIEEHSDHQPSSEGMKNEECFLIDHLQLGLTALQNLLTKYPDLASVFSSKERLLPLFECFSVAIASKTDIPKLCLNVLSRLTAYAPCLETMVSDGSSLLLLLQMLHSAPSFREGALHVLYALASTPELAWAAAKHEEIPLQQRAAAASLLGKLVAQPMHGPRVAITLVRFLPDGLVSIIRDGPGEAVVHALERTTETPELVWTPAMAASLSAQIATMASDIYREQQKGSVIEWDVPEQSAGQQEMRDEPQVGGIYVRRFLKDPKFPLRNPKRFLEGLLDQYLSAMAATHYEQHPVDPELPLLLSAALVSLLRVHPALADHIGHLGYVPKLVAAVAYEGRRETMSSGEVKAEEIGSDGVNESTDPSSLPGQTPQERVRLSCLRVLHQLAASTTCAEAMAATSAGNAQVVPLLMKAIGWLGGSILALETLKRVVVAGNRARDALVAQGLKVGLIEVLLGLLDWRTGGRYGLSSHMKWNESEASIGRVLAVEVSVEFVSEMFVMCVTHVLHGFATEGAHCSKVREILDASEVWSAYKDQKHDLFLPSNTQSAAGVAGFIENSSNSLTYALTAPPPPSHP

SEQ ID NO: 31777 - protein, 2433 aa, Arabidopsis thaliana
  misc_feature (1)..(2433): Ceres Seq. ID no. 13588788
MKFSSRCRASILTELYRLRWNQIRPVAEFQVLHLRRRNAEWVPYKLKITFVGLELVDSKSGNSRWILDFRDMGSPAIILLSDAYRTKSADSAGFVLCPMYGRKSKAFRAAPGTTNSSIVASLAKTAKSMVGVFLSVDDSQLLTVSEYMTRRAKEAVGAEETPNGWWSVTRLRSAAHGTLNMPGLSLAIGPKGGLGEHGDAVALQLILTKASLVERRIDNYEVVIVRPLSSVSSLVRFAEEPQMFAIEFSDGCPVLGHCPIPVLPRLTMPGHRIDPPCGRVSLISGPQHLVADLETCSLHLKHLAAAAKDAVAEGGSVPGCRARLWRRIREFNACIPYTGVPANSEVPEVTLMALITMLPSTPNLPVDAPPLPPPSPKAAATVIGFVTCLRRLLSSRSAASHIMSFPAAVNRIMGLLRNGSEGVAAEAAGLIASLIGGWSADLSTAPDSRGEKHATIMHTKSVLFAQQGYVTILVNRLKPMSVSPLFSMAIVEVFEAMVCDPHGETTQYTVFVELLRQIAALRRRLFALFAHPAESVRETIAVIMRTIAEEDAIAAESMRDAALRDGALLRHLLNAFSLPASERREVSRQLVALWADSYQPALDLLSRVLPPGLVAYLHTRPDDVVDDTDQEGSSTNRRQKRLLQQRRGRIAKGMGAQDIPLPPGNNVEAGDAAKHMSANASVPDNFQRRAADSSSEASNPQASAFPGVDSTIAGVSQNGYPAFASVTTNANGHEQPETNASDVVGSDPNLYGIQNSVLPAPAQVIVESTAVGSGKLLLNWREFWRAFGLDHNRADLIWNERTRQELIEALKAEVHNLDVEKERTEDISPGDVEATTGQEIIPRISWNYSEFSVSYRSLSKEVCVGQYYLRLLLESGNAGKAQDFPLRDPVAFFRALYHRFQCDADMGLTIDGAVPDELGSSGDWCDMSRLDGFGGGGGASVRELCARAMAIVYEQHYNTIGPFEGTAHITALIDRTNDRALRHRLLLLLKALVKVLLNVEGCVVVGGCVLAVDLLTVVHENSERTPIPLQSNLIAATAFMEPPKEWMYIDKGGAEVGPVEKDVIRSLWSKKDIDWTTKCRALGMSDWKKLRDIRELRWAVAVRVPVLTPSQVGDAALSILHSMVSAHSDLDDAGEIVTPTPRVKRILSSTRCLPHIAQALLSGEPVIVEAGAALLKDVVTRNSKAMIRLYSTGAFYFALAYPGSNLYSIAQLFSVTHVHQAFHGGEEATVSSSLPLAKRSVLGGLLPESLLYVLERSGPAAFAAGMVSDSDTPEIIWTHKMRAENLICQVLQHLGDYPQKLSQHCHSLYDYAPMPPVTYPELRDEMWCHRYYLRNLCDEIQFPNWPIVEHVEFLQSLLVMWREELTRKPMDLSEGEACKILEISLNNVSSDDLNRTASVELNEEISNISKQIQNLDEEKLKRQYRKLAMRYHPDKNPEGREKFLAVQKAYECLQATMQGLQGPQPWRLLLLLKAQCILYRRYGHVLRPFKYAGYPMLLDAVTVDKDDNNFLSNDRSPLLVAASELVSLTCAASSLNGEELVRDGGVQLLSTLLSRCMCVVQPTTSQHEPAAIIVTNVMRTLSVISQFESARAGFLELPSLIEDIVHCTELERVPAAVDAALQSIAKVSVFPELQHGLLKAGALWYILPLLLQYDSTAEESNSVESHGVGVSIQIAKNEHALQASQALSRLTGLCADESLTPYNATAADVLKALLTPKLASLLKDEVAKDLLSKLNTNLETPEIIWNSATRSELLNFVDEQRACQCPDGSYDLKNAQSFSYDALSKEVFVGNVYLKVYNDQPDSEISEPESFCNALIDFISSLVHTELPSVSEDQNLIEDRNSSNDTPELQSSVAEPSLIEEHSDHQPSSEGMKNEECFLIDHLQLGLTALQNLLTKYPDLASVFSSKERLLPLFECFSVAIASKTDIPKLCLNVLSRLTAYAPCLETMVSDGSSLLLLLQMLHSAPSFREGALHVLYALASTPELAWAAAKHEEIPLQQRAAAASLLGKLVAQPMHGPRVAITLVRFLPDGLVSIIRDGPGEAVVHALERTTETPELVWTPAMAASLSAQIATMASDIYREQQKGSVIEWDVPEQSAGQQEMRDEPQVGGIYVRRFLKDPKFPLRNPKRFLEGLLDQYLSAMAATHYEQHPVDPELPLLLSAALVSLLRVHPALADHIGHLGYVPKLVAAVAYEGRRETMSSGEVKAEEIGSDGVNESTDPSSLPGQTPQERVRLSCLRVLHQLAASTTCAEAMAATSAGNAQVVPLLMKAIGWLGGSILALETLKRVVVAGNRARDALVAQGLKVGLIEVLLGLLDWRTGGRYGLSSHMKWNESEASIGRVLAVEVSVEFVSEMFVMCVTHVLHGFATEGAHCSKVREILDASEVWSAYKDQKHDLFLPSNTQSAAGVAGFIENSSNSLTYALTAPPPPSHP

SEQ ID NO: 31778 - protein, 2362 aa, Arabidopsis thaliana
  misc_feature (1)..(2362): Ceres Seq. ID no. 13588789
MGSPAIILLSDAYRTKSADSAGFVLCPMYGRKSKAFRAAPGTTNSSIVASLAKTAKSMVGVFLSVDDSQLLTVSEYMTRRAKEAVGAEETPNGWWSVTRLRSAAHGTLNMPGLSLAIGPKGGLGEHGDAVALQLILTKASLVERRIDNYEVVIVRPLSSVSSLVRFAEEPQMFAIEFSDGCPVLGHCPIPVLPRLTMPGHRIDPPCGRVSLISGPQHLVADLETCSLHLKHLAAAAKDAVAEGGSVPGCRARLWRRIREFNACIPYTGVPANSEVPEVTLMALITMLPSTPNLPVDAPPLPPPSPKAAATVIGFVTCLRRLLSSRSAASHIMSFPAAVNRIMGLLRNGSEGVAAEAAGLIASLIGGWSADLSTAPDSRGEKHATIMHTKSVLFAQQGYVTILVNRLKPMSVSPLFSMAIVEVFEAMVCDPHGETTQYTVFVELLRQIAALRRRLFALFAHPAESVRETIAVIMRTIAEEDAIAAESMRDAALRDGALLRHLLNAFSLPASERREVSRQLVALWADSYQPALDLLSRVLPPGLVAYLHTRPDDVVDDTDQEGSSTNRRQKRLLQQRRGRIAKGMGAQDIPLPPGNNVEAGDAAKHMSANASVPDNFQRRAADSSSEASNPQASAFPGVDSTIAGVSQNGYPAFASVTTNANGHEQPETNASDVVGSDPNLYGIQNSVLPAPAQVIVESTAVGSGKLLLNWREFWRAFGLDHNRADLIWNERTRQELIEALKAEVHNLDVEKERTEDISPGDVEATTGQEIIPRISWNYSEFSVSYRSLSKEVCVGQYYLRLLLESGNAGKAQDFPLRDPVAFFRALYHRFQCDADMGLTIDGAVPDELGSSGDWCDMSRLDGFGGGGGASVRELCARAMAIVYEQHYNTIGPFEGTAHITALIDRTNDRALRHRLLLLLKALVKVLLNVEGCVVVGGCVLAVDLLTVVHENSERTPIPLQSNLIAATAFMEPPKEWMYIDKGGAEVGPVEKDVIRSLWSKKDIDWTTKCRALGMSDWKKLRDIRELRWAVAVRVPVLTPSQVGDAALSILHSMVSAHSDLDDAGEIVTPTPRVKRILSSTRCLPHIAQALLSGEPVIVEAGAALLKDVVTRNSKAMIRLYSTGAFYFALAYPGSNLYSIAQLFSVTHVHQAFHGGEEATVSSSLPLAKRSVLGGLLPESLLYVLERSGPAAFAAGMVSDSDTPEIIWTHKMRAENLICQVLQHLGDYPQKLSQHCHSLYDYAPMPPVTYPELRDEMWCHRYYLRNLCDEIQFPNWPIVEHVEFLQSLLVMWREELTRKPMDLSEGEACKILEISLNNVSSDDLNRTASVELNEEISNISKQIQNLDEEKLKRQYRKLAMRYHPDKNPEGREKFLAVQKAYECLQATMQGLQGPQPWRLLLLLKAQCILYRRYGHVLRPFKYAGYPMLLDAVTVDKDDNNFLSNDRSPLLVAASELVSLTCAASSLNGEELVRDGGVQLLSTLLSRCMCVVQPTTSQHEPAAIIVTNVMRTLSVISQFESARAGFLELPSLIEDIVHCTELERVPAAVDAALQSIAKVSVFPELQHGLLKAGALWYILPLLLQYDSTAEESNSVESHGVGVSIQIAKNEHALQASQALSRLTGLCADESLTPYNATAADVLKALLTPKLASLLKDEVAKDLLSKLNTNLETPEIIWNSATRSELLNFVDEQRACQCPDGSYDLKNAQSFSYDALSKEVFVGNVYLKVYNDQPDSEISEPESFCNALIDFISSLVHTELPSVSEDQNLIEDRNSSNDTPELQSSVAEPSLIEEHSDHQPSSEGMKNEECFLIDHLQLGLTALQNLLTKYPDLASVFSSKERLLPLFECFSVAIASKTDIPKLCLNVLSRLTAYAPCLETMVSDGSSLLLLLQMLHSAPSFREGALHVLYALASTPELAWAAAKHEEIPLQQRAAAASLLGKLVAQPMHGPRVAITLVRFLPDGLVSIIRDGPGEAVVHALERTTETPELVWTPAMAASLSAQIATMASDIYREQQKGSVIEWDVPEQSAGQQEMRDEPQVGGIYVRRFLKDPKFPLRNPKRFLEGLLDQYLSAMAATHYEQHPVDPELPLLLSAALVSLLRVHPALADHIGHLGYVPKLVAAVAYEGRRETMSSGEVKAEEIGSDGVNESTDPSSLPGQTPQERVRLSCLRVLHQLAASTTCAEAMAATSAGNAQVVPLLMKAIGWLGGSILALETLKRVVVAGNRARDALVAQGLKVGLIEVLLGLLDWRTGGRYGLSSHMKWNESEASIGRVLAVEVSVEFVSEMFVMCVTHVLHGFATEGAHCSKVREILDASEVWSAYKDQKHDLFLPSNTQSAAGVAGFIENSSNSLTYALTAPPPPSHP

SEQ ID NO: 31779 - DNA, 1581 bp, Arabidopsis thaliana
  misc_feature (1)..(1581): Ceres Seq. ID no. 13588795
tggagaaatcgctgatagagagtagagagacacacgcagattttgagctgcgtgctctgttttaagcttgaaggaggaaaaacatggcagaccaagaatcagataagaacattgagatttggaagattaagaagctaatcaaaggacttgaaaccgcaagaggtaatggaacaagtatgatctctcttataatgcctcctagagatcaagtagctcgtgtcactaagatgcttgctgatgaatacggaaccgcctcaaacatcaagagtcgagtgaatcgtcaatctgttttatctgccattacttctgctcaacaaagattgaagctttacaacaaagttcctccgaatggtcttgttctctatactggaaccattgttactgatgatggtaaagagaagaaagtgacgattgatttcgagccttttaaaccgattaatgcttcgttgtatttgtgtgacaataagttccacaccgagcctttgaatgagcttttggagtctgatgataagtttggtttcattgttatggatggaaatggaactttgtttggtactttgagtgggaatacaagagaggttcttcataagttcactgtcgatcttccgaaaaagcacggaagaggaggacaatctgcgttgcgatttgctcgtcttaggatggagaagagacataactatgtgaggaaaaccgcggagcttgccactcagttttacattaatccagctacgagtcagcctaatgtctctggtcttatacttgctggttcagcggattttaagaccgagctaagtcaatcagaactgtttgatcctcgtcttcaagctaagatattgaatgtggttgatgtttcttacggaggagagaatggtttcaaccaagcaattgagctgtctgctgagattctatctaatgtgaagttcatacaagaaaagaaattgattgggaagtactttgaggagattagtcaagacactgggaaatatgttttcggtgttgaagatactttaaaggctctggaaatgggtgctgttgagactcttatagtgtgggagaatctagatattaataggtatgagttaaagaacaacacgaccggagaaatcgtgattaagcatttgggaaaggatcaagagaacaaccaaagcaatttccatgatgcagagactaatgcagagttagaagttcaggagaagatgcctctgcttgaatggtttgctaacgaatataaacgttttggttgtacacttgagtttgtgactaacaagtcccaagaaggatcacaattttgcagaggctttggcggtattggtggattgttgcggtaccagcttgatatgaggacattcgatgaattatccgatggtgaagtttatgaagactcagattaagtaagagaaaatgtggtttaagatctgaagaaggatttgaagtttggggaaaaaaagaaagactatgaacttttgtttgatatactttgtctctctctattatcttctgttgccgcttttaagtttttctgaaacagttatgttaaaatgtatgagaaatttgagcttcattatactctattttgaagac

SEQ ID NO: 31780 - protein, 435 aa, Arabidopsis thaliana
  misc_feature (1)..(435): Ceres Seq. ID no. 13588796
MADQESDKNIEIWKIKKLIKGLETARGNGTSMISLIMPPRDQVARVTKMLADEYGTASNIKSRVNRQSVLSAITSAQQRLKLYNKVPPNGLVLYTGTIVTDDGKEKKVTIDFEPFKPINASLYLCDNKFHTEPLNELLESDDKFGFIVMDGNGTLFGTLSGNTREVLHKFTVDLPKKHGRGGQSALRFARLRMEKRHNYVRKTAELATQFYINPATSQPNVSGLILAGSADFKTELSQSELFDPRLQAKILNVVDVSYGGENGFNQAIELSAEILSNVKFIQEKKLIGKYFEEISQDTGKYVFGVEDTLKALEMGAVETLIVWENLDINRYELKNNTTGEIVIKHLGKDQENNQSNFHDAETNAELEVQEKMPLLEWFANEYKRFGCTLEFVTNKSQEGSQFCRGFGGIGGLLRYQLDMRTFDELSDGEVYEDSD

SEQ ID NO: 31781 - protein, 404 aa, Arabidopsis thaliana
  misc_feature (1)..(404): Ceres Seq. ID no. 13588797
MISLIMPPRDQVARVTKMLADEYGTASNIKSRVNRQSVLSAITSAQQRLKLYNKVPPNGLVLYTGTIVTDDGKEKKVTIDFEPFKPINASLYLCDNKFHTEPLNELLESDDKFGFIVMDGNGTLFGTLSGNTREVLHKFTVDLPKKHGRGGQSALRFARLRMEKRHNYVRKTAELATQFYINPATSQPNVSGLILAGSADFKTELSQSELFDPRLQAKILNVVDVSYGGENGFNQAIELSAEILSNVKFIQEKKLIGKYFEEISQDTGKYVFGVEDTLKALEMGAVETLIVWENLDINRYELKNNTTGEIVIKHLGKDQENNQSNFHDAETNAELEVQEKMPLLEWFANEYKRFGCTLEFVTNKSQEGSQFCRGFGGIGGLLRYQLDMRTFDELSDGEVYEDSD

SEQ ID NO: 31782 - protein, 399 aa, Arabidopsis thaliana
  misc_feature (1)..(399): Ceres Seq. ID no. 13588798
MPPRDQVARVTKMLADEYGTASNIKSRVNRQSVLSAITSAQQRLKLYNKVPPNGLVLYTGTIVTDDGKEKKVTIDFEPFKPINASLYLCDNKFHTEPLNELLESDDKFGFIVMDGNGTLFGTLSGNTREVLHKFTVDLPKKHGRGGQSALRFARLRMEKRHNYVRKTAELATQFYINPATSQPNVSGLILAGSADFKTELSQSELFDPRLQAKILNVVDVSYGGENGFNQAIELSAEILSNVKFIQEKKLIGKYFEEISQDTGKYVFGVEDTLKALEMGAVETLIVWENLDINRYELKNNTTGEIVIKHLGKDQENNQSNFHDAETNAELEVQEKMPLLEWFANEYKRFGCTLEFVTNKSQEGSQFCRGFGGIGGLLRYQLDMRTFDELSDGEVYEDSD

SEQ ID NO: 31783 - DNA, 1765 bp, Arabidopsis thaliana
  misc_feature (1)..(1765): Ceres Seq. ID no. 13588825
ccttttatctgtagatttttttgcagtaaaaaaaagaaaaaacagaaacatttttaactatttatctcttcttcttcatctccttcgtccttgaagcttaaactagcgcactccagtaaaagcagaggagaagagaagagagacggcgcagagtagcattgacatgcgaaatgtgcctctcagaattcttatcctacgcctgtttcaatttcttctccaccatgaaagttttctgattgctctttcctcagaaattttgaagcttcgtagtttcttctgcattcctcgcaatgcattggattacgagattctctgctttcttctccgccgcattagccatgattctcctttctccttcgctccaatccttttctccggcggcagctatccgatcatctcacccctacgccgacgaattcaaaccccaacaaaactccgattactcctccttcagagaatctccaatgttccgtaacgccgaacaatgcagatcttccggcgaagattccggcgtctgtaaccctaatctcgtccacgtagccatcactctcgacatcgattacctccgtggctcaatcgcagccgtcaattcgatcctccagcactcaatgtgccctcaaagcgtcttcttccacttcctcgtctcctccgagtctcaaaacctagaatctctgattcgttctactttccccaaattgacgaatctcaaaatttactattttgcccctgagaccgtacagtctttgatttcatcttccgtgagacaagccctagagcaaccgttgaattacgccagaaattacttggcggatctgctcgagccttgcgttaagcgagtcatctacttggattcggatctcgtcgtcgtcgatgatatcgtcaagctttggaaaacgggtttaggccagagaacaatcggagctccggagtattgtcacgcgaatttcacgaaatacttcaccggaggtttttggtcagataagaggtttaacgggacgttcaaagggaggaacccttgttacttcaatactggtgtaatggtgattgatttgaagaagtggagacaatttaggttcacgaaacgaattgagaaatggatggagattcagaagatagagaggatttatgagcttggttctcttcctccgtttcttctggtatttgctggtcatgtagctccgatttcacatcggtggaatcaacatgggcttggtggtgataatgttagaggtagttgccgtgatttgcattctggtcctgtgagtttgcttcactggtcaggtagtggtaagccatggttaagactcgattccaagcttccatgtcctttagacacattgtgggcaccttatgatttgtataaacactcccattgatgccaatttcgagttcgacatattcatggtcatggggactaaaccgaagatagcagagttgcaatggtggttttcaactggaaacaactatgttgaagattgagtaaaccctgccggaacagagtgctatagtagtgttgcttcggacagttcaaccagaccgtagacacaatttagaagagtgaacttcgttttaagtgttgtaccggcggttaaatatgttcttgtgggaagaaaaaaaataaaaatatagttaggtcattcacacatagctcaggttaaagcgtttttgttgtttatgattggtcctataagtaattttgtgcagactctagtccttactttggttctcaaaagtctttagaaatctatggttaaagattttacct

SEQ ID NO: 31784 - protein, 361 aa, Arabidopsis thaliana
  misc_feature (1)..(361): Ceres Seq. ID no. 13588826
MHWITRFSAFFSAALAMILLSPSLQSFSPAAAIRSSHPYADEFKPQQNSDYSSFRESPMFRNAEQCRSSGEDSGVCNPNLVHVAITLDIDYLRGSIAAVNSILQHSMCPQSVFFHFLVSSESQNLESLIRSTFPKLTNLKIYYFAPETVQSLISSSVRQALEQPLNYARNYLADLLEPCVKRVIYLDSDLVVVDDIVKLWKTGLGQRTIGAPEYCHANFTKYFTGGFWSDKRFNGTFKGRNPCYFNTGVMVIDLKKWRQFRFTKRIEKWMEIQKIERIYELGSLPPFLLVFAGHVAPISHRWNQHGLGGDNVRGSCRDLHSGPVSLLHWSGSGKPWLRLDSKLPCPLDTLWAPYDLYKHSH

SEQ ID NO: 31785 - protein, 345 aa, Arabidopsis thaliana
  misc_feature (1)..(345): Ceres Seq. ID no. 13588827
MILLSPSLQSFSPAAAIRSSHPYADEFKPQQNSDYSSFRESPMFRNAEQCRSSGEDSGVCNPNLVHVAITLDIDYLRGSIAAVNSILQHSMCPQSVFFHFLVSSESQNLESLIRSTFPKLTNLKIYYFAPETVQSLISSSVRQALEQPLNYARNYLADLLEPCVKRVIYLDSDLVVVDDIVKLWKTGLGQRTIGAPEYCHANFTKYFTGGFWSDKRFNGTFKGRNPCYFNTGVMVIDLKKWRQFRFTKRIEKWMEIQKIERIYELGSLPPFLLVFAGHVAPISHRWNQHGLGGDNVRGSCRDLHSGPVSLLHWSGSGKPWLRLDSKLPCPLDTLWAPYDLYKHSH

SEQ ID NO: 31786 - protein, 303 aa, Arabidopsis thaliana
  misc_feature (1)..(303): Ceres Seq. ID no. 13588828
MFRNAEQCRSSGEDSGVCNPNLVHVAITLDIDYLRGSIAAVNSILQHSMCPQSVFFHFLVSSESQNLESLIRSTFPKLTNLKIYYFAPETVQSLISSSVRQALEQPLNYARNYLADLLEPCVKRVIYLDSDLVVVDDIVKLWKTGLGQRTIGAPEYCHANFTKYFTGGFWSDKRFNGTFKGRNPCYFNTGVMVIDLKKWRQFRFTKRIEKWMEIQKIERIYELGSLPPFLLVFAGHVAPISHRWNQHGLGGDNVRGSCRDLHSGPVSLLHWSGSGKPWLRLDSKLPCPLDTLWAPYDLYKHSH

SEQ ID NO: 31787 - DNA, 1076 bp, Arabidopsis thaliana
  misc_feature (1)..(1076): Ceres Seq. ID no. 13588829
aacacgagcttaccgattctcttcgtctcaacatttagggtttcagagatcggctgattttcacatccacaagtatggcgactcaaatcagcaagaagagaaagtttgtagcggatggtgtattctacgctgaattgaatgaggttctcacaagagagctagcagaggatggttactctggtgttgaggttagggttactccaatgaggactgagattatcatcagagctactcgtactcagaatgttcttggtgagaaggggaggagaattagggaattgacatctcttgtccagaagagattcaagtttccagttgacagtgttgagctctatgctgagaaggttaacaacagaggtctctgtgccattgctcaggctgagtctctacgttacaagcttctcggtggtcttgctgttcgcagggcctgttatggtgttttgagatttgttatggagagtggagctaagggatgtgaggtcatcgtgagtggaaagctccgtgctgcacgtgctaagtccatgaagttcaaggatggttacatggtttcatctggtcaaccaactaaggaatacatcgatgctgcagtgagacatgttttgctcagacagggggtgttgggaatcaaggtgaagatcatgcttgactgggaccctacgggcaaatcaggaccaaagacaccattgcctgatgttgtgatcattcatgctcctaaagatgatgttgtctactctgcacctgctcaggctgctgctccagttactcttgtgcaagaagctccactcacaaccgtagattaccctgagatgattcctccagtggcctagagaagaccttttttactattactccatgggattttgttctttttgttataacttttctacttttgacactctctagtcgtatctcttatatcctccaagcagacaagttttttctcatgttgtttcttaacctatgtcaagttttctggaggttgaatgcttttagttccatgatttttttgttcttaagactcgtaataagaaaaagaatgacgacaacaatgcctggtatttgatgttgttactttg

SEQ ID NO: 31788 - protein, 250 aa, Arabidopsis thaliana [sequence omitted]

SEQ ID NO: 31789 - protein, 207 aa, Arabidopsis thaliana
  misc_feature (1)..(207): Ceres Seq. ID no. 15220913
MRTEIIIRATRTQNVLGEKGRRIRELTSLVQKRFKFPVDSVELYAEKVNNRGLCAIAQAESLRYKLLGGLAVRRACYGVLRFVMESGAKGCEVIVSGKLRAARAKSMKFKDGYMVSSGQPTKEYIDAAVRHVLLRQGVLGIKVKIMLDWDPTGKSGPKTPLPDVVIIHAPKDDVVYSAPAQAAAPVTLVQEAPLTTVDYPEMIPPVA

SEQ ID NO: 31790 - DNA, 1118 bp, Arabidopsis thaliana
  misc_feature (1)..(1118): Ceres Seq. ID no. 13588838
gtttggtttttggatcagtatacagagattcaatgagctgttttggctgttgccgtgaagatgatttgcctggagctaatgattatggaggtcacaatatgaccaaacaatctggaggaaatgatggaaggcgcaacggctctgaaactgcacaaaaaggtgctcagagtgtgaaagtgcagcctatagaagtagctgctattctcgctgatgaactgattgaagcaacgaatgattttggaactaattctcttatcggtgaaggctcgtatgcgagagtgtatcacggggtgttaaagaatggtcagcgtgcagccattaaaaagttagattctaacaaacagcctaatgaagagtttctagcacaggtttccatggtttcgaggttgaagcatgttaactttgttgagctgcttggttactctgttgatgggaattcgaggatacttgtctttgagtttgcccaaaatggatctcttcatgatattcttcacgggagaaaaggtgtgaagggagcaaagcctggtccactcttgtcgtggcatcaacgagtgaagattgctgttggagcagcaagagggcttgagtatttacatgaaaaggcaaatccacatgtcatccaccgtgacataaaatccagcaatgttctaatctttgataacgatgtagccaagatagctgactttgatctctcaaatcaagctcctgatatggcagcacgccttcattcaactcgtgttcttggaacctttggttaccatgcccctgaatatgcaatgactgggcaattgagtgccaagagtgacgtatacagtttcggagttgtactgctcgagcttcttacaggtcgaaagcctgttgatcatacattgcctcgaggccagcaaagtctagtcacatgggctacaccaaagctaagcgaagacaaggttaagcagtgtgttgattcaagactgggaggagattaccctccaaaagctgttgctaagttagctgctgttgctgcattgtgtgtacaatacgaagctgatttcagaccaaacatgagtattgtcgtgaaggctctgcaaccattgttgaatgctcggaccggacctgcaggagaaggagcaccttag

SEQ ID NO: 31791 - protein, 371 aa, Arabidopsis thaliana
  misc_feature (1)..(371): Ceres Seq. ID no. 13588839
LVFGSVYRDSMSCFGCCREDDLPGANDYGGHNMTKQSGGNDGRRNGSETAQKGAQSVKVQPIEVAAILADELIEATNDFGTNSLIGEGSYARVYHGVLKNGQRAAIKKLDSNKQPNEEFLAQVSMVSRLKHVNFVELLGYSVDGNSRILVFEFAQNGSLHDILHGRKGVKGAKPGPLLSWHQRVKIAVGAARGLEYLHEKANPHVIHRDIKSSNVLIFDNDVAKIADFDLSNQAPDMAARLHSTRVLGTFGYHAPEYAMTGQLSAKSDVYSFGVVLLELLTGRKPVDHTLPRGQQSLVTWATPKLSEDKVKQCVDSRLGGDYPPKAVAKLAAVAALCVQYEADFRPNMSIVVKALQPLLNARTGPAGEGAP

SEQ ID NO: 31792 - protein, 361 aa, Arabidopsis thaliana
  misc_feature (1)..(361): Ceres Seq. ID no. 13588840
MSCFGCCREDDLPGANDYGGHNMTKQSGGNDGRRNGSETAQKGAQSVKVQPIEVAAILADELIEATNDFGTNSLIGEGSYARVYHGVLKNGQRAAIKKLDSNKQPNEEFLAQVSMVSRLKHVNFVELLGYSVDGNSRILVFEFAQNGSLHDILHGRKGVKGAKPGPLLSWHQRVKIAVGAARGLEYLHEKANPHVIHRDIKSSNVLIFDNDVAKIADFDLSNQAPDMAARLHSTRVLGTFGYHAPEYAMTGQLSAKSDVYSFGVVLLELLTGRKPVDHTLPRGQQSLVTWATPKLSEDKVKQCVDSRLGGDYPPKAVAKLAAVAALCVQYEADFRPNMSIVVKALQPLLNARTGPAGEGAP

SEQ ID NO: 31793 - protein, 339 aa, Arabidopsis thaliana
  misc_feature (1)..(339): Ceres Seq. ID no. 13588841
MTKQSGGNDGRRNGSETAQKGAQSVKVQPIEVAAILADELIEATNDFGTNSLIGEGSYARVYHGVLKNGQRAAIKKLDSNKQPNEEFLAQVSMVSRLKHVNFVELLGYSVDGNSRILVFEFAQNGSLHDILHGRKGVKGAKPGPLLSWHQRVKIAVGAARGLEYLHEKANPHVIHRDIKSSNVLIFDNDVAKIADFDLSNQAPDMAARLHSTRVLGTFGYHAPEYAMTGQLSAKSDVYSFGVVLLELLTGRKPVDHTLPRGQQSLVTWATPKLSEDKVKQCVDSRLGGDYPPKAVAKLAAVAALCVQYEADFRPNMSIVVKALQPLLNARTGPAGEGAP

SEQ ID NO: 31794 - DNA, 1220 bp, Arabidopsis thaliana
  misc_feature (1)..(1220): Ceres Seq. ID no. 13588846
aatcgatctcaaccgtccgatcatccatcttgccatcaccgttcaccaatcttcttcgtctcctctctctttctctctttttgctgtttctagctcctctctctctggatctcgccggcgaaccgtttctcttgggtgtaaacagtagcaatcaagctatagaatctcagatatcgctgaattagctgttggattttatccgccttttcttcgttatccggggctcgggtataaggtttcatcgtcttatttcatctgtaaatgggctgcttccactcaaaggcagcaaaagaatttcgaggacacgaagaccctgttaagcttgcctctgagacagcttttagtgtgagtgaggttgaagcattatttgagctattcaagagcataagcagttcggttgttgatgatggtctgattaacaaggaggagtttcaacttgctttgttcaaaagccggaagagggagaatatatttgctaataggatatttgatatgtttgatgttaaacgaaaaggagtcatcgatttcggggactttgtaagatcactcaatgttttccaccccaatgcttctctagaagacaaaatagattttacgtttaggctttacgacatggactgcacgggttacattgaacgacaagaggtcaagcaaatgttgatcgcgcttctctgcgaatctgaaatgaaactggctgatgaaaccatagagataatactcgataagacatttgaagatgcagacgtgaatcaagatggaaaaattgataaattagagtggagtgatttcgtaaacaaaaatccatcattgcttaagatcatgactcttccatatctcagggatattacgacaacgtttccgagttttgtcttccattcggaggtcgatgagattgccacatgaagaaacaaactggtttaagaccgagtagattgccacgagttggaagaacaagtctgagctaatcggtgtaatcaacatctgtttgtaaacagtagtagagcatattctcttgaaattgtttgggttacttttttcttctcacaacagtttaaaattttgggtttttagcttacaaaaaaaaaaaaaagaagaagcgcgtaatcaccaatccttcacttcatatagttaggaaatgttaatgagtttgtacatattacatcatacgtttgttgtaattgttttttttcaagtaaaaaagtaaagatttgttacgtttc

SEQ ID NO: 31795 - protein, 213 aa, Arabidopsis thaliana
  misc_feature (1)..(213): Ceres Seq. ID no. 13588847
MGCFHSKAAKEFRGHEDPVKLASETAFSVSEVEALFELFKSISSSVVDDGLINKEEFQLALFKSRKRENIFANRIFDMFDVKRKGVIDFGDFVRSLNVFHPNASLEDKIDFTFRLYDMDCTGYIERQEVKQMLIALLCESEMKLADETIEIILDKTFEDADVNQDGKIDKLEWSDFVNKNPSLLKIMTLPYLRDITTTFPSFVFHSEVDEIAT

SEQ ID NO: 31796 - protein, 136 aa, Arabidopsis thaliana
  misc_feature (1)..(136): Ceres Seq. ID no. 13588848
MFDVKRKGVIDFGDFVRSLNVFHPNASLEDKIDFTFRLYDMDCTGYIERQEVKQMLIALLCESEMKLADETIEIILDKTFEDADVNQDGKIDKLEWSDFVNKNPSLLKIMTLPYLRDITTTFPSFVFHSEVDEIAT

SEQ ID NO: 31797 - DNA, 1572 bp, Arabidopsis thaliana
  misc_feature (1)..(1572): Ceres Seq. ID no. 13588853
tttttttctgctttcatctgttgggattgtagtttcgttaagctttagaaatgggatgctttgcatcaaggccgaatgatactggtggaaacagaagaaagccaacgagcatcggagatgtttcagtatatgtacctggtttaaggatacctaagcccgtggagttttctcagtcactgggtgatcaattgccaaagactctagtggagcgcttgacagctttaagaacgagaatagttgtgatggcaaatcaagaaggaccaactataacaagaaccaggaggaagacacagcatggaggttctacgctcgcagatctccatcacgctttggaagattatctaccggttctcttaggattaactaaagatggtagccatttacaattcaaagtacagtttaattgggtaaatcaggaagatgaagaagaggaaacagccatgtcaaatgtttggtatgaaatattgtcggttttgcatctaatggcaatgttacaaatgtcacaagccaatttactgcttcttcctagaggttccagtgatggctatcatccaaaaatatcagaagaaaataggcgagcttcaatcgatatcttcttaaaagcagctggatacctggactgtgctgtgaagcatgttcttcctcatttttcaaccgagcagaggagaagtttaccaattgacctagcagaaggagctttacgtgcactttgcttgcaagcattaggccagggtgttgatatccaacttgggatggcgattgatagtgcaaaagccactcttgccgtgaagcgaagactttcatgtgaaatggtgaaatactggcagcaggcacaagataacttaatgaatcttccattagcaaacgggtggggcgaaaagcatatgctctttgttaagtggaagtatgttgaagctaaggctgcagcttactactaccacggtctgattcttgatgaaggaaatacagagaaatcacatggcatggcggttgctgctttacaggctgcagatgagtgtttgaaagaaagtaagaaagcaagtgaggcgtttaacacctcttcacccacgtcaaggactccttcacttttcgggacaatgaaatatctatcagagaaaataccaaaagaaacttcaagtaaagtcaggataaaccgtgatctatactcttatgaaaagatcatggagacagcaccaacgcttcctgattttgccttggcattgaaacccgatgagtaccaacttccttctgttgatgcgtcatggtctgaagccagtctacggactaaaaacacatcaaatcacatatagggcaaccaaagatagagcagtgaatagaatgcatatcaacaccttatagagttacaatgccaatggccgccatagaaacacaaatggtatagctctataactaccctagtgattctccaaatgtcaaataatatatgggtgtgaaaaaagtaccgaattggattagttttcaggtaaaaatatgggaagatgtcgtctgttttctctgtatgttgttgtaattttgtatgtttagtgcaataaaattcgattctttctgttc

SEQ ID NO: 31798 - protein, 419 aa, Arabidopsis thaliana
  misc_feature (1)..(419): Ceres Seq. ID no. 13588854
MGCFASRPNDTGGNRRKPTSIGDVSVYVPGLRIPKPVEFSQSLGDQLPKTLVERLTALRTRIVVMANQEGPTITRTRRKTQHGGSTLADLHHALEDYLPVLLGLTKDGSHLQFKVQFNWVNQEDEEEETAMSNVWYEILSVLHLMAMLQMSQANLLLLPRGSSDGYHPKISEENRRASIDIFLKAAGYLDCAVKHVLPHFSTEQRRSLPIDLAEGALRALCLQALGQGVDIQLGMAIDSAKATLAVKRRLSCEMVKYWQQAQDNLMNLPLANGWGEKHMLFVKWKYVEAKAAAYYYHGLILDEGNTEKSHGMAVAALQAADECLKESKKASEAFNTSSPTSRTPSLFGTMKYLSEKIPKETSSKVRINRDLYSYEKIMETAPTLPDFALALKPDEYQLPSVDASWSEASLRTKNTSNHI

SEQ ID NO: 31799 - protein, 355 aa, Arabidopsis thaliana
  misc_feature (1)..(355): Ceres Seq. ID no. 13588855
MANQEGPTITRTRRKTQHGGSTLADLHHALEDYLPVLLGLTKDGSHLQFKVQFNWVNQEDEEEETAMSNVWYEILSVLHLMAMLQMSQANLLLLPRGSSDGYHPKISEENRRASIDIFLKAAGYLDCAVKHVLPHFSTEQRRSLPIDLAEGALRALCLQALGQGVDIQLGMAIDSAKATLAVKRRLSCEMVKYWQQAQDNLMNLPLANGWGEKHMLFVKWKYVEAKAAAYYYHGLILDEGNTEKSHGMAVAALQAADECLKESKKASEAFNTSSPTSRTPSLFGTMKYLSEKIPKETSSKVRINRDLYSYEKIMETAPTLPDFALALKPDEYQLPSVDASWSEASLRTKNTSNHI

SEQ ID NO: 31800 - protein, 289 aa, Arabidopsis thaliana
  misc_feature (1)..(289): Ceres Seq. ID no. 13588856
MSNVWYEILSVLHLMAMLQMSQANLLLLPRGSSDGYHPKISEENRRASIDIFLKAAGYLDCAVKHVLPHFSTEQRRSLPIDLAEGALRALCLQALGQGVDIQLGMAIDSAKATLAVKRRLSCEMVKYWQQAQDNLMNLPLANGWGEKHMLFVKWKYVEAKAAAYYYHGLILDEGNTEKSHGMAVAALQAADECLKESKKASEAFNTSSPTSRTPSLFGTMKYLSEKIPKETSSKVRINRDLYSYEKIMETAPTLPDFALALKPDEYQLPSVDASWSEASLRTKNTSNHI

SEQ ID NO: 31801 - DNA, 1943 bp, Arabidopsis thaliana
  misc_feature (1)..(1943): Ceres Seq. ID no. 13588865
aacacttacaagttttacaacaaacgtaatatataaaacattactaattattacaagaaacaatcagaaacatcatggaggagcaaagcaagaacaagatcagtgaagaagaaaaacaactccatgggagaccaaatcgaccaaagggaggattaattaccatgcccttcatcttcgcgaacgagatatgtgaaaaattagcggtggtggggtttcacgcaaacatgataagttacttaacaacacagcttcaccttcccttaaccaaagcagccaacactctcacaaacttcgccgggacatcgagtcttactcctctccttggtgcctttatcgccgactctttcgccggccgattttggaccatcacttttgcttccatcatctaccaaatcgggatgacgttgcttacgatatcggcaataataccaacgctaaggccaccaccatgtaaaggagaagaggtttgtgtagtagctgacacagcacaattgagtatactttacgtagctcttcttcttggagctctcgggtcgggtgggatccgaccatgtgttgttgcttttggtgctgatcagttcgacgagtcggatcctaatcaaaccaccaaaacttggaactacttcaactggtactacttttgcatgggtgcagcagttttactggcggtgacggttcttgtgtggatccaagataacgttgggtggggtctaggtttaggcattccgacagtagctatgttcttatccgttattgcttttgtcggcggttttcaactttaccgtcacttggttcccgcgggtagtccatttacccgcttgatccaagtgggagtcgcggcatttcgcaaaaggaaactgaggatggtttctgatccctctcttctctattttaacgacgagattgatgcacctatctccttaggtggtaaactcacccacaccaaacacatgagtttcttggacaaggcggcaatagtaacggaggaagacaatttaaaaccgggtcaaatcccaaaccattggaggctaagcacagtccatcgagtcgaagaactcaaatccgtcatccgaatgggtccaatcggagcatccgggattctcctaatcacagcctatgctcaacaaggaaccttctcattacaacaagccaaaaccatgaaccgtcacctaacaaactccttccaaatcccagccggttcaatgtccgtcttcacaaccgtcgctatgcttaccacaatcatcttctacgaccgcgtcttcgtcaaagtcgctcgcaaattcaccggtctcgaaagaggcatcacgttcctccaccgtatgggaatcggattcgtaatctcgataatcgccacgttagttgccggattcgtcgaagtaaagcgaaagagcgtcgcgattgagcacggtctcctcgataaacctcacacgattgttccaatctcgtttctttggttgattcctcaatatggtctccatggagtcgctgaagctttcatgtccatcggacatttagagttcttctacgatcaggcaccggagagtatgaggagcacggcaacggcgcttttttggatggcgatttcgatcggaaactatgtgagcactttgctggtgactttggttcataaattcagtgctaaaccggatgggagcaattggttaccggataacaatttgaaccgagggaggcttgagtatttttactggttgattactgtgttacaagctgttaatcttgtgtattatctatggtgcgccaagatttatacgtataaaccggttcaggttcatcatagcaaggaagatagtagtccggttaaggaggaattgcagttgtcaaataggagtttagttgatgaatgagtcttggcgttggatgtgtaatgtaaaattactaaattagtatagttgtaatatgtacttatcaatccaataaattag

SEQ ID NO: 31802 - protein, 596 aa, Arabidopsis thaliana
  misc_feature (1)..(596): Ceres Seq. ID no. 15220914
MEEQSKNKISEEEKQLHGRPNRPKGGLITMPFIFANEICEKLAVVGFHANMISYLTTQLHLPLTKAANTLTNFAGTSSLTPLLGAFIADSFAGRFWTITFASIIYQIGMTLLTISAIIPTLRPPPCKGEEVCVVADTAQLSILYVALLLGALGSGGIRPCVVAFGADQFDESDPNQTTKTWNYFNWYYFCMGAAVLLAVTVLVWIQDNVGWGLGLGIPTVAMFLSVIAFVGGFQLYRHLVPAGSPFTRLIQVGVAAFRKRKLRMVSDPSLLYFNDEIDAPISLGGKLTHTKHMSFLDKAAIVTEEDNLKPGQIPNHWRLSTVHRVEELKSVIRMGPIGASGILLITAYAQQGTFSLQQAKTMNRHLTNSFQIPAGSMSVFTTVAMLTTIIFYDRVFVKVARKFTGLERGITFLHRMGIGFVISIIATLVAGFVEVKRKSVAIEHGLLDKPHTIVPISFLWLIPQYGLHGVAEAFMSIGHLEFFYDQAPESMRSTATALFWMAISIGNYVSTLLVTLVHKFSAKPDGSNWLPDNNLNRGRLEYFYWLITVLQAVNLVYYLWCAKIYTYKPVQVHHSKEDSSPVKEELQLSNRSLVDE

SEQ ID NO: 31803 - protein, 567 aa, Arabidopsis thaliana
  misc_feature (1)..(567): Ceres Seq. ID no. 15220915
MPFIFANEICEKLAVVGFHANMISYLTTQLHLPLTKAANTLTNFAGTSSLTPLLGAFIADSFAGRFWTITFASIIYQIGMTLLTISAIIPTLRPPPCKGEEVCVVADTAQLSILYVALLLGALGSGGIRPCVVAFGADQFDESDPNQTTKTWNYFNWYYFCMGAAVLLAVTVLVWIQDNVGWGLGLGIPTVAMFLSVIAFVGGFQLYRHLVPAGSPFTRLIQVGVAAFRKRKLRMVSDPSLLYFNDEIDAPISLGGKLTHTKHMSFLDKAAIVTEEDNLKPGQIPNHWRLSTVHRVEELKSVIRMGPIGASGILLITAYAQQGTFSLQQAKTMNRHLTNSFQIPAGSMSVFTTVAMLTTIIFYDRVFVKVARKFTGLERGITFLHRMGIGFVISIIATLVAGFVEVKRKSVAIEHGLLDKPHTIVPISFLWLIPQYGLHGVAEAFMSIGHLEFFYDQAPESMRSTATALFWMAISIGNYVSTLLVTLVHKFSAKPDGSNWLPDNNLNRGRLEYFYWLITVLQAVNLVYYLWCAKIYTYKPVQVHHSKEDSSPVKEELQLSNRSLVDE

SEQ ID NO: 31804 - protein, 546 aa, Arabidopsis thaliana
  misc_feature (1)..(546): Ceres Seq. ID no. 15220916
MISYLTTQLHLPLTKAANTLTNFAGTSSLTPLLGAFIADSFAGRFWTITFASIIYQIGMTLLTISAIIPTLRPPPCKGEEVCVVADTAQLSILYVALLLGALGSGGIRPCVVAFGADQFDESDPNQTTKTWNYFNWYYFCMGAAVLLAVTVLVWIQDNVGWGLGLGIPTVAMFLSVIAFVGGFQLYRHLVPAGSPFTRLIQVGVAAFRKRKLRMVSDPSLLYFNDEIDAPISLGGKLTHTKHMSFLDKAAIVTEEDNLKPGQIPNHWRLSTVHRVEELKSVIRMGPIGASGILLITAYAQQGTFSLQQAKTMNRHLTNSFQIPAGSMSVFTTVAMLTTIIFYDRVFVKVARKFTGLERGITFLHRMGIGFVISIIATLVAGFVEVKRKSVAIEHGLLDKPHTIVPISFLWLIPQYGLHGVAEAFMSIGHLEFFYDQAPESMRSTATALFWMAISIGNYVSTLLVTLVHKFSAKPDGSNWLPDNNLNRGRLEYFYWLITVLQAVNLVYYLWCAKIYTYKPVQVHHSKEDSSPVKEELQLSNRSLVDE

SEQ ID NO: 31805 - DNA, 1159 bp, Arabidopsis thaliana
  misc_feature (1)..(1159): Ceres Seq. ID no. 13588871
gaagagagaaagattacaagaaacaaatatggtagatcaaaataaagcatttggttgggcggccaacgacgaatcgggcgtcctctctccatttcatttctctagaagagaaaatggtgagaacgatgtaacagtgaagatcttgttctgtggtgtttgtcactctgatcttcataccatcaagaaccattggggattctctcgttaccccattattcccgggcatgaaatcgttggaatagcaacaaaagttgggaagaatgtgacaaagtttaaagaaggagaccgagtaggagtaggcgtaataatcggttcatgccaatcatgtgaatcatgtaaccaagacttagaaaactattgtcctaaagtcgttttcacatacaactctcgttcctctgacggaaccagcagaaaccaaggtggttattccgacgtaattgttgtcgatcaccgctttgtcctaagcattcccgatggtttaccaagcgattcaggcgcgccgctgctctgtgctggaatcactgtgtacagtcccatgaagtattatggcatgactaaagaatcagggaaacgtttaggtgtgaatggacttggtggacttggtcatatcgctgttaagattggtaaagcctttggtttaagagttactgtgattagtaggtcatcagaaaaagagagagaagcaattgatcggcttggtgctgattcgtttcttgttacaacggattctcaaaagatgaaggaagcggttggaactatggatttcattatcgatacggtatcagcagaacatgctctattaccgttgtttagtttgcttaaagtgaatggaaagcttgtggctttaggcttaccggagaagccactcgacctgccaattttctctctagttctcggaaggaaaatggtgggaggaagtcagattggagggatgaaggagacacaagagatgcttgagttctgtgccaagcataaaatcgtttcggatattgagctcataaagatgagtgatatcaactctgcgatggaccgtttggctaaatctgatgtcaggtaccggttcgtgatcgatgtggccaactctttactccctgagtcgtcagctgagattttaacggagcaggtggaccatggagtctcgatcacgtctagattctga

SEQ ID NO: 31806 - protein, 385 aa, Arabidopsis thaliana
  misc_feature (1)..(385): Ceres Seq. ID no. 13588872
KRERLQETNMVDQNKAFGWAANDESGVLSPFHFSRRENGENDVTVKILFCGVCHSDLHTIKNHWGFSRYPIIPGHEIVGIATKVGKNVTKFKEGDRVGVGVIIGSCQSCESCNQDLENYCPKVVFTYNSRSSDGTSRNQGGYSDVIVVDHRFVLSIPDGLPSDSGAPLLCAGITVYSPMKYYGMTKESGKRLGVNGLGGLGHIAVKIGKAFGLRVTVISRSSEKEREAIDRLGADSFLVTTDSQKMKEAVGTMDFIIDTVSAEHALLPLFSLLKVNGKLVALGLPEKPLDLPIFSLVLGRKMVGGSQIGGMKETQEMLEFCAKHKIVSDIELIKMSDINSAMDRLAKSDVRYRFVIDVANSLLPESSAEILTEQVDHGVSITSRF

SEQ ID NO: 31807 - protein, 376 aa, Arabidopsis thaliana
  misc_feature (1)..(376): Ceres Seq. ID no. 13588873
MVDQNKAFGWAANDESGVLSPFHFSRRENGENDVTVKILFCGVCHSDLHTIKNHWGFSRYPIIPGHEIVGIATKVGKNVTKFKEGDRVGVGVIIGSCQSCESCNQDLENYCPKVVFTYNSRSSDGTSRNQGGYSDVIVVDHRFVLSIPDGLPSDSGAPLLCAGITVYSPMKYYGMTKESGKRLGVNGLGGLGHIAVKIGKAFGLRVTVISRSSEKEREAIDRLGADSFLVTTDSQKMKEAVGTMDFIIDTVSAEHALLPLFSLLKVNGKLVALGLPEKPLDLPIFSLVLGRKMVGGSQIGGMKETQEMLEFCAKHKIVSDIELIKMSDINSAMDRLAKSDVRYRFVIDVANSLLPESSAEILTEQVDHGVSITSRF

SEQ ID NO: 31808 - protein, 207 aa, Arabidopsis thaliana
  misc_feature (1)..(207): Ceres Seq. ID no. 13588874
MKYYGMTKESGKRLGVNGLGGLGHIAVKIGKAFGLRVTVISRSSEKEREAIDRLGADSFLVTTDSQKMKEAVGTMDFIIDTVSAEHALLPLFSLLKVNGKLVALGLPEKPLDLPIFSLVLGRKMVGGSQIGGMKETQEMLEFCAKHKIVSDIELIKMSDINSAMDRLAKSDVRYRFVIDVANSLLPESSAEILTEQVDHGVSITSRF

SEQ ID NO: 31809 - DNA, 1225 bp, Arabidopsis thaliana
  misc_feature (1)..(1225): Ceres Seq. ID no. 13588890
atcaagtgacaaaagaaaaacaaacgtactcaaatggctctttcttcaccttcaagaatcctctgttttgctcttgccttatccgctgcttctctctccctctctttcgcttcttcccacgattactccatcgttggatactcccccgaggatttggaatctcatgacaaactcatagaactcttcgaaaactggatctcaaattttgagaaagcttatgaaaccgttgaagagaagtttcttaggttcgaagttttcaaggataatctaaagcacatcgatgagactaacaagaaagggaaaagctactggctcgggctcaacgagtttgcggatttgagccatgaggagttcaagaaaatgtatttagggctcaagactgatatagtgagacgcgatgaagaaagatcttacgcagagttcgcttacagggacgtcgaagctgttcctaagtctgttgactggagaaagaaaggagctgtggcggaagttaagaaccagggctcttgtggaagttgttgggcgttttcgacagtagcagctgtcgaaggtataaacaagattgtgacaggaaacttgacaacattgtcagaacaagaactcatagactgtgacacgacctacaacaatggctgcaacggtggtctcatggactatgcctttgagtacattgttaagaacggaggtctacgcaaggaagaagattatccttactctatggaagaaggaacttgcgagatgcaaaaggatgaatctgaaacagtaaccattaatggacaccaagacgtacctactaatgatgagaagagtctcttgaaggcattggctcatcagcctctcagtgtcgccattgatgcatctggtagagagttccagttctatagcggcggcgtgtttgatgggcggtgcggggttgatcttgaccacggtgtggctgcggttgggtatggatcaagcaagggttcagattacatcattgtgaagaattcttggggaccaaaatggggagaaaaaggttacatcaggctgaagaggaacactgggaaaccagagggtctctgtggaatcaacaagatggcttctttccccaccaaaactaagtgatcatcagatcattctctcttatctgcatttgatcagcatcttacagtgtcttcgttttttctcttttgatttatcaacggaagtcttgtaacaactatgtgcaataatacctatatataag

SEQ ID NO: 31810 - protein, 356 aa, Arabidopsis thaliana
  misc_feature (1)..(356): Ceres Seq. ID no. 13588891
MALSSPSRILCFALALSAASLSLSFASSHDYSIVGYSPEDLESHDKLIELFENWISNFEKAYETVEEKFLRFEVFKDNLKHIDETNKKGKSYWLGLNEFADLSHEEFKKMYLGLKTDIVRRDEERSYAEFAYRDVEAVPKSVDWRKKGAVAEVKNQGSCGSCWAFSTVAAVEGINKIVTGNLTTLSEQELIDCDTTYNNGCNGGLMDYAFEYIVKNGGLRKEEDYPYSMEEGTCEMQKDESETVTINGHQDVPTNDEKSLLKALAHQPLSVAIDASGREFQFYSGGVFDGRCGVDLDHGVAAVGYGSSKGSDYIIVKNSWGPKWGEKGYIRLKRNTGKPEGLCGINKMASFPTKTK

SEQ ID NO: 31811 - protein, 247 aa, Arabidopsis thaliana
  misc_feature (1)..(247): Ceres Seq. ID no. 13588892
MYLGLKTDIVRRDEERSYAEFAYRDVEAVPKSVDWRKKGAVAEVKNQGSCGSCWAFSTVAAVEGINKIVTGNLTTLSEQELIDCDTTYNNGCNGGLMDYAFEYIVKNGGLRKEEDYPYSMEEGTCEMQKDESETVTINGHQDVPTNDEKSLLKALAHQPLSVAIDASGREFQFYSGGVFDGRCGVDLDHGVAAVGYGSSKGSDYIIVKNSWGPKWGEKGYIRLKRNTGKPEGLCGINKMASFPTKTK

SEQ ID NO: 31812 - DNA, 922 bp, Arabidopsis thaliana
  misc_feature (1)..(922): Ceres Seq. ID no. 13588916
gtctctctgtctctttctctttctctctctctcagaaactctttctccaaaaatggcagaggcaagtttctatatcggagtcataggaaatgtaatctccgtactagttttcctctcaccagtggagacgttttggaaaatagtgaagcggagatcaacggaggagtacaaaagcttgccgtacatttgcacgttgttaggatcatcgctatggacatattacggcatcgtcactcccggagaatatcttgtctccaccgttaatggctttggtgctcttgttgaaaccatctacgtttcactttttctcttttatgcccctcgacatctcaagctgaaaacagtggtagtggtagcgatgttgaacgtgttttttccaatcgcggcgattgtggcaacgagaagtgcgtttgaagatgagaagatgcgttctcaatcaataggtttcatatctgctggtctaaacattataatgtatggttctccactttcagcaatgaaaacagtagtgacaacaaagagcgtgaaatacatgccgttttggttgtcgtttttcctcttcttaaacggcgcgatttgggctgtctatgctttactccaacacgacgttttcttactcgtgccaaatggagtggggtttgtgtttgggacaatgcaactcatactttatggaatttacagaaatgccaaaccggttggtttaagcaacggtttaagtgagattgctcaagatgaagaggaaggcctcacatcacgtgttgaacctctcctctcttaaatcccttttttttttatgtcaagagcttgttaattaatttgggtcttataaatacaaatctttatattttttgttacattattgtggtgtgcgattttgtgtacgttatttttttggacaaaattagattaatttgaagatgtt

SEQ ID NO: 31813 - protein, 258 aa, Arabidopsis thaliana
  misc_feature (1)..(258): Ceres Seq. ID no. 13588917
SLCLFLFLSLSETLSPKMAEASFYIGVIGNVISVLVFLSPVETFWKIVKRRSTEEYKSLPYICTLLGSSLWTYYGIVTPGEYLVSTVNGFGALVETIYVSLFLFYAPRHLKLKTVVVVAMLNVFFPIAAIVATRSAFEDEKMRSQSIGFISAGLNIIMYGSPLSAMKTVVTTKSVKYMPFWLSFFLFLNGAIWAVYALLQHDVFLLVPNGVGFVFGTMQLILYGIYRNAKPVGLSNGLSEIAQDEEEGLTSRVEPLLS

SEQ ID NO: 31814 - protein, 241 aa, Arabidopsis thaliana
  misc_feature (1)..(241): Ceres Seq. ID no. 13588918
MAEASFYIGVIGNVISVLVFLSPVETFWKIVKRRSTEEYKSLPYICTLLGSSLWTYYGIVTPGEYLVSTVNGFGALVETIYVSLFLFYAPRHLKLKTVVVVAMLNVFFPIAAIVATRSAFEDEKMRSQSIGFISAGLNIIMYGSPLSAMKTVVTTKSVKYMPFWLSFFLFLNGAIWAVYALLQHDVFLLVPNGVGFVFGTMQLILYGIYRNAKPVGLSNGLSEIAQDEEEGLTSRVEPLLS

SEQ ID NO: 31815 - protein, 139 aa, Arabidopsis thaliana
  misc_feature (1)..(139): Ceres Seq. ID no. 13588919
MLNVFFPIAAIVATRSAFEDEKMRSQSIGFISAGLNIIMYGSPLSAMKTVVTTKSVKYMPFWLSFFLFLNGAIWAVYALLQHDVFLLVPNGVGFVFGTMQLILYGIYRNAKPVGLSNGLSEIAQDEEEGLTSRVEPLLS

SEQ ID NO: 31816 - DNA, 756 bp, Arabidopsis thaliana
  misc_feature (1)..(756): Ceres Seq. ID no. 13588920
aaaattagcttccggttttatcttctcgaattcagaaaaaagcccttgtccaatatctctctactcgtacaacaatggcgtcgatggctgcaaccaccaatttcaccaaatctatgctctttccattctctcatgtttcaggaaatgcgagcttgaattcgcagagaagaacatggccaaagcagtacaagtctaaaaatggttacaggtctcttcgagtgaatggattatttggaggtggaaacaaagataataacagtgaagatggacaatcaaaggcaggaatatttggtaatatgcagaatatgtatgagactgtgaagaaagctcaaatggttgttcaagtggaagctgtacgtgttcaaaaagagttagctgccgcagaatttgatggttattgtgcaggcgagcttgtcaaggttacgttatcaggtaaccagcaaccaatccgtactgatattaccgaggcagcaatggaactaggttccgaaaaactatcacaacttgtcacagaagcatacaaggacgcacacgccaagagtgtggtggctatgaaagagagaatgagtgaccttgcgcagagcttaggaatgccaccgggtctcagcgaaggaatgaagtaagaagctgtttttgttgtttcatttcaactttcaggtatgagaggttcggctttttttgtttgtttgtatatcagtcaggcagaagcaaagagctttgtactctactcttatggaattatatataaaagattcg

SEQ ID NO: 31817 - protein, 182 aa, Arabidopsis thaliana
  misc_feature (1)..(182): Ceres Seq. ID no. 15220921
MASMAATTNFTKSMLFPFSHVSGNASLNSQRRTWPKQYKSKNGYRSLRVNGLFGGGNKDNNSEDGQSKAGIFGNMQNMYETVKKAQMVVQVEAVRVQKELAAAEFDGYCAGELVKVTLSGNQQPIRTDITEAAMELGSEKLSQLVTEAYKDAHAKSVVAMKERMSDLAQSLGMPPGLSEGMK

SEQ ID NO: 31818 - protein, 179 aa, Arabidopsis thaliana
  misc_feature (1)..(179): Ceres Seq. ID no. 15220922
MAATTNFTKSMLFPFSHVSGNASLNSQRRTWPKQYKSKNGYRSLRVNGLFGGGNKDNNSEDGQSKAGIFGNMQNMYETVKKAQMVVQVEAVRVQKELAAAEFDGYCAGELVKVTLSGNQQPIRTDITEAAMELGSEKLSQLVTEAYKDAHAKSVVAMKERMSDLAQSLGMPPGLSEGMK

SEQ ID NO: 31819 - protein, 169 aa, Arabidopsis thaliana
  misc_feature (1)..(169): Ceres Seq. ID no. 15220923
MLFPFSHVSGNASLNSQRRTWPKQYKSKNGYRSLRVNGLFGGGNKDNNSEDGQSKAGIFGNMQNMYETVKKAQMVVQVEAVRVQKELAAAEFDGYCAGELVKVTLSGNQQPIRTDITEAAMELGSEKLSQLVTEAYKDAHAKSVVAMKERMSDLAQSLGMPPGLSEGMK

SEQ ID NO: 31820 - DNA, 1728 bp, Arabidopsis thaliana
  misc_feature (1)..(1728): Ceres Seq. ID no. 13588930
tatcccacaacaatctttgctacattttcatgcatttttaatcactcctctttctaactccaataaaaacacaataatggatcttcttgttatgctcctctctcttctcgtctcttatctcatcttcaagatctggaaacgcatagactccaagagagaccaaaactgctacatcttggactaccaatgtcacaaaccttccgatgatcgtatggtgaacactcaattcagcggtgatatcatccttcgaaacaaacaccttcggctcaacgagtacaagttcctcctcaaagccatcgttagttccggtatcggagagcaaacttacgcaccaaggctcttctttgagggccgtgaacagcgtcctacgctacaggatgggctctcggagatggaagagttttacatagacaccatcgagaaagtccttaagagaaacaaaatttcaccttcggagattgacatcctcgtagtcaacgtctcaatgctcaattcaacgccttcactatctgcaagaatcattaaccattacaaaatgagagaagacataaaagtcttcaacttgacggcgatgggatgtagcgcgagtgttatctccatagatattgtcaaaaacatcttcaaaacatacaagaacaagcttgctcttgtcgtgacctcagagtcacttagtcctaactggtacagcggaaacaaccggtccatgattcttgccaactgtttgttccgctctggtggctgcgctgttctcttgacgaacaagcgtagtctgagcaggagagccatgttcaagctaaggtgtttggtaaggacgcaccatggagccagagacgattcattcaacgcctgtgtccaaaaagaagacgagctaggacatatcggtgtccacttagacaagactcttccaaaagcagcgactcgtgctttcatagacaacctcaaagtcatcactcccaagattcttccggtaacagagcttttaaggtttatgttgtgtcttcttctcaagaagcttcgtagcagccctagcaaaggctcgacgaacgtgactcaggcagctccaaaggcaggggttaaagcagggattaacttcaagaccggtattgaccatttctgcattcacactggaggtaaagcggttatcgacgcgatcggttacagcctcgacttaaacgagtacgatcttgaaccggcgaggatgacgttacaccggtttggaaacacgtcagcgagtagcttgtggtatgttttggggtatatggaggcaaagaagaggctgaagagaggagatagagtgttcatgatcagctttggggcaggtttcaagtgcaatagttgcgtttgggaagttgtgagagatcttaacgttggagaagctgtagggaatgtgtggaatcattgcattaatcaatacccaccaaaatcgattttgaatccgtttttcgagaagtatggttggattcatgaagaagaagatcctgatactttcaagatgcccgaaggatttatgtgaatgttttcttgggaatcattgtaaacatacatatacagttacttcaaactgcaaatcccacaaaaggtgactatatagtttattttcctctttctttcttttattttatttaatgtggattctgaattgctacattttactctctctttctttctttttctttttttctaattggatgggaaagaaaatatgaatgacaaagatactgcgatata

SEQ ID NO: 31821 - protein, 503 aa, Arabidopsis thaliana
  misc_feature (1)..(503): Ceres Seq. ID no. 13588931
IPQQSLLHFHAFLITPLSNSNKNTIMDLLVMLLSLLVSYLIFKIWKRIDSKRDQNCYILDYQCHKPSDDRMVNTQFSGDIILRNKHLRLNEYKFLLKAIVSSGIGEQTYAPRLFFEGREQRPTLQDGLSEMEEFYIDTIEKVLKRNKISPSEIDILVVNVSMLNSTPSLSARIINHYKMREDIKVFNLTAMGCSASVISIDIVKNIFKTYKNKLALVVTSESLSPNWYSGNNRSMILANCLFRSGGCAVLLTNKRSLSRRAMFKLRCLVRTHHGARDDSFNACVQKEDELGHIGVHLDKTLPKAATRAFIDNLKVITPKILPVTELLRFMLCLLLKKLRSSPSKGSTNVTQAAPKAGVKAGINFKTGIDHFCIHTGGKAVIDAIGYSLDLNEYDLEPARMTLHRFGNTSASSLWYVLGYMEAKKRLKRGDRVFMISFGAGFKCNSCVWEVVRDLNVGEAVGNVWNHCINQYPPKSILNPFFEKYGWIHEEEDPDTFKMPEGFM

SEQ ID NO: 31822 - protein, 478 aa, Arabidopsis thaliana
  misc_feature (1)..(478): Ceres Seq. ID no. 13588932
MDLLVMLLSLLVSYLIFKIWKRIDSKRDQNCYILDYQCHKPSDDRMVNTQFSGDIILRNKHLRLNEYKFLLKAIVSSGIGEQTYAPRLFFEGREQRPTLQDGLSEMEEFYIDTIEKVLKRNKISPSEIDILVVNVSMLNSTPSLSARIINHYKMREDIKVFNLTAMGCSASVISIDIVKNIFKTYKNKLALVVTSESLSPNWYSGNNRSMILANCLFRSGGCAVLLTNKRSLSRRAMFKLRCLVRTHHGARDDSFNACVQKEDELGHIGVHLDKTLPKAATRAFIDNLKVITPKILPVTELLRFMLCLLLKKLRSSPSKGSTNVTQAAPKAGVKAGINFKTGIDHFCIHTGGKAVIDAIGYSLDLNEYDLEPARMTLHRFGNTSASSLWYVLGYMEAKKRLKRGDRVFMISFGAGFKCNSCVWEVVRDLNVGEAVGNVWNHCINQYPPKSILNPFFEKYGWIHEEEDPDTFKMPEGFM

SEQ ID NO: 31823 - protein, 473 aa, Arabidopsis thaliana
  misc_feature (1)..(473): Ceres Seq. ID no. 13588933
MLLSLLVSYLIFKIWKRIDSKRDQNCYILDYQCHKPSDDRMVNTQFSGDIILRNKHLRLNEYKFLLKAIVSSGIGEQTYAPRLFFEGREQRPTLQDGLSEMEEFYIDTIEKVLKRNKISPSEIDILVVNVSMLNSTPSLSARIINHYKMREDIKVFNLTAMGCSASVISIDIVKNIFKTYKNKLALVVTSESLSPNWYSGNNRSMILANCLFRSGGCAVLLTNKRSLSRRAMFKLRCLVRTHHGARDDSFNACVQKEDELGHIGVHLDKTLPKAATRAFIDNLKVITPKILPVTELLRFMLCLLLKKLRSSPSKGSTNVTQAAPKAGVKAGINFKTGIDHFCIHTGGKAVIDAIGYSLDLNEYDLEPARMTLHRFGNTSASSLWYVLGYMEAKKRLKRGDRVFMISFGAGFKCNSCVWEVVRDLNVGEAVGNVWNHCINQYPPKSILNPFFEKYGWIHEEEDPDTFKMPEGFM

SEQ ID NO: 31824 - DNA, 1088 bp, Arabidopsis thaliana
  misc_feature (1)..(1088): Ceres Seq. ID no. 13588934
tcttccaaaaaagacaaaaaaattcttcccatcttcttcctcctaacaggcagaggatgatgatgatgatcttcatcaagattctcttgaacccaaaataatcgtcggaaagaacttgtttctgtatataattgcatacacttggtgaatctttttaaaagcaaaaaggaaaaaaaatgaatgatttattctctagttcgttcaagaagtacacggacctgaagcaacaggcccaaatggatgatattgagtcaggtaaagagacgatgaacctcgataagttctttgaggatgtcgaaaatgtcaaagatgacatgaaaggcgtagagactctttacaagagtcttcattattctaacgaagagtgcaaaactgtacacaatgccaagaaggtgaaggaactccgagcaaagatggatggagatgtcgctcaggtcctcaagagagtcaagatgatcaaacaaaagcttgaggcgcttgaaaaagcaaatgctaatagccgtaatgtctctggttgtggccctggctcttccaccgataggaccaggacgtctgttgttagtggactcgggaaaaagcttaaggacttgatggatagttttcaaggtctgcgtgcgcggatgaacgctgagtataaagaaaccgtagagcgcagatatttcacgataaccggagaacaggcagacgaacagacgattgagaacttgatttcgagtggtgaaagcgagaattttcttcagaaagcaatacaagaacaagggagaggccaaatattagacactatatcagagattcaagagagacacgacgcggtcaaagagatagagaagaatcttatagagcttcaccaagtgttcttagacatggcggctctggtggaatcacaaggtcagcaactaaatgacatagaaagccacgtctcgaaggcgagctcgttcgtgagaagagggacagaccagcttcaagatgcaagagaataccaaaagagctcgaggaaatggacttgttatgccattcttctcttcatagtcgttttcgctttgcttctcataccagccttacctcatatcatgctcatgttgaagtga

SEQ ID NO: 31825 - protein, 303 aa, Arabidopsis thaliana
  misc_feature (1)..(303): Ceres Seq. ID no. 13588935
MNDLFSSSFKKYTDLKQQAQMDDIESGKETMNLDKFFEDVENVKDDMKGVETLYKSLHYSNEECKTVHNAKKVKELRAKMDGDVAQVLKRVKMIKQKLEALEKANANSRNVSGCGPGSSTDRTRTSVVSGLGKKLKDLMDSFQGLRARMNAEYKETVERRYFTITGEQADEQTIENLISSGESENFLQKAIQEQGRGQILDTISEIQERHDAVKEIEKNLIELHQVFLDMAALVESQGQQLNDIESHVSKASSFVRRGTDQLQDAREYQKSSRKWTCYAILLFIVVFALLLIPALPHIMLMLK

SEQ ID NO: 31826 - protein, 283 aa, Arabidopsis thaliana
  misc_feature (1)..(283): Ceres Seq. ID no. 13588936
MDDIESGKETMNLDKFFEDVENVKDDMKGVETLYKSLHYSNEECKTVHNAKKVKELRAKMDGDVAQVLKRVKMIKQKLEALEKANANSRNVSGCGPGSSTDRTRTSVVSGLGKKLKDLMDSFQGLRARMNAEYKETVERRYFTITGEQADEQTIENLISSGESENFLQKAIQEQGRGQILDTISEIQERHDAVKEIEKNLIELHQVFLDMAALVESQGQQLNDIESHVSKASSFVRRGTDQLQDAREYQKSSRKWTCYAILLFIVVFALLLIPALPHIMLMLK

SEQ ID NO: 31827 - protein, 273 aa, Arabidopsis thaliana
  misc_feature (1)..(273): Ceres Seq. ID no. 13588937
MNLDKFFEDVENVKDDMKGVETLYKSLHYSNEECKTVHNAKKVKELRAKMDGDVAQVLKRVKMIKQKLEALEKANANSRNVSGCGPGSSTDRTRTSVVSGLGKKLKDLMDSFQGLRARMNAEYKETVERRYFTITGEQADEQTIENLISSGESENFLQKAIQEQGRGQILDTISEIQERHDAVKEIEKNLIELHQVFLDMAALVESQGQQLNDIESHVSKASSFVRRGTDQLQDAREYQKSSRKWTCYAILLFIVVFALLLIPALPHIMLMLK

SEQ ID NO: 31828 - DNA, 1908 bp, Arabidopsis thaliana
  misc_feature (1)..(1908): Ceres Seq. ID no. 13588938
gaaaagaaagatcattagtttctgaggggataaccatttttttttcttcttaaaaagtttttttttttgtcaattggtcttcttcttcctcatccgctcgcttatatttaatttaataataataaaaatcggtgttcatttttatataaaagtataaattttgtgtttggttgatccatccgtagtcgtagtagatctacaagctctgaaattccacgcccacatctcctccgtcctcttgagatccttctcttcattcattttcttgctcaacttgagttgcttccaacatcttgcaagattgtctttgagttcattcaggtcttgaagaagagcactcttttaagctgtgtgaaacttgcgccgttcctgtgaagaactacttttggcattgcagatttcagagagctgtgatttgtgctatcttaaaaacggacaagttctatgttgtggcggatgagatgagggatgctatctgggttgatgaattttctgaatgcctgtctctggccacggtcagatcagcaggctcgttctgcctcagattctggtggccgccaagagggtttgctctggttcagagactccggccagcacgtctttggtgacttctccatggccgtcgttcaagccaacagcttgctagaggaccagagccagctcgagtctggctctcttagctcccacgactctggtccctttggcacctttgttggcgtctacgacggccacggtgggcctgagacatctcgcttcatcaatgatcatatgttccaccacctcaagaggtttactgcagagcaacagtgtatgtcatcagaggtgataaaaaaagcgttccaagccactgaagaaggcttcttatccatagttacaaatcaatttcaaactagacctcagatagccacagtgggatcatgctgtcttgtaagtgtcatctgcgatgggaagctatacgtggccaacgcaggggactcacgggccgttctgggacaagtcatgagggtaacaggtgaagctcatgccactcagctctcagcagagcacaacgcatctatagagtcagtgagacgggaacttcaggccctgcatccggatcatccagatattgtggttctgaaacataacgtctggcgagtaaaaggcatcattcaggtttcaagatccattggtgatgtgtatttgaaaaggtcagagttcaacagggaaccactgtatgcaaaattccggctgaggtcaccgttcagcaagccattactgagtgcagagccggcgatcacggtgcatacactggagccgcacgatcagttcattatatgtgcatcagatggactgtgggaacatatgagcaaccaagaagcagtagacatagtccagaatcatccgcgaaacgggatagcaaagcggctggtgaaagtagcgctacaagaagcggcaaagaagagagagatgagatactcagacctgaaaaagatagacagaggagtgaggagacatttccacgatgacataacagtgattgttgtcttctttgatacaaacctagtgagcagaggaagtatgttgagaggaccagccgtgtcagtgagaggagcgggtgtgaatctacctcacaacaccctggcgccttgcaccacgcccactcaagctgctgctgctggcgcctcctgactattgaatttttacggtgtccttaaaattctttccaagatccttcctgtaactatatataaatatatatatttgattattattatcattgactgggaaaggatatatcatcatcaagtgggaaaggatatatcataatcaagtggttagttttgtttgttccctttgttagctgtgtactggagaaagaaaggtgacaagaattcttcttcttcttcattaattttcattgcttgc

SEQ ID NO: 31829 - protein, 400 aa, Arabidopsis thaliana
  misc_feature (1)..(400): Ceres Seq. ID no. 13588939
MLSGLMNFLNACLWPRSDQQARSASDSGGRQEGLLWFRDSGQHVFGDFSMAVVQANSLLEDQSQLESGSLSSHDSGPFGTFVGVYDGHGGPETSRFINDHMFHHLKRFTAEQQCMSSEVIKKAFQATEEGFLSIVTNQFQTRPQIATVGSCCLVSVICDGKLYVANAGDSRAVLGQVMRVTGEAHATQLSAEHNASIESVRRELQALHPDHPDIVVLKHNVWRVKGIIQVSRSIGDVYLKRSEFNREPLYAKFRLRSPFSKPLLSAEPAITVHTLEPHDQFIICASDGLWEHMSNQEAVDIVQNHPRNGIAKRLVKVALQEAAKKREMRYSDLKKIDRGVRRHFHDDITVIVVFFDTNLVSRGSMLRGPAVSVRGAGVNLPHNTLAPCTTPTQAAAAGAS

SEQ ID NO: 31830 - protein, 395 aa, Arabidopsis thaliana
  misc_feature (1)..(395): Ceres Seq. ID no. 13588940
MNFLNACLWPRSDQQARSASDSGGRQEGLLWFRDSGQHVFGDFSMAVVQANSLLEDQSQLESGSLSSHDSGPFGTFVGVYDGHGGPETSRFINDHMFHHLKRFTAEQQCMSSEVIKKAFQATEEGFLSIVTNQFQTRPQIATVGSCCLVSVICDGKLYVANAGDSRAVLGQVMRVTGEAHATQLSAEHNASIESVRRELQALHPDHPDIVVLKHNVWRVKGIIQVSRSIGDVYLKRSEFNREPLYAKFRLRSPFSKPLLSAEPAITVHTLEPHDQFIICASDGLWEHMSNQEAVDIVQNHPRNGIAKRLVKVALQEAAKKREMRYSDLKKIDRGVRRHFHDDITVIVVFFDTNLVSRGSMLRGPAVSVRGAGVNLPHNTLAPCTTPTQAAAAGAS

SEQ ID NO: 31831 - protein, 351 aa, Arabidopsis thaliana
  misc_feature (1)..(351): Ceres Seq. ID no. 13588941
MAVVQANSLLEDQSQLESGSLSSHDSGPFGTFVGVYDGHGGPETSRFINDHMFHHLKRFTAEQQCMSSEVIKKAFQATEEGFLSIVTNQFQTRPQIATVGSCCLVSVICDGKLYVANAGDSRAVLGQVMRVTGEAHATQLSAEHNASIESVRRELQALHPDHPDIVVLKHNVWRVKGIIQVSRSIGDVYLKRSEFNREPLYAKFRLRSPFSKPLLSAEPAITVHTLEPHDQFIICASDGLWEHMSNQEAVDIVQNHPRNGIAKRLVKVALQEAAKKREMRYSDLKKIDRGVRRHFHDDITVIVVFFDTNLVSRGSMLRGPAVSVRGAGVNLPHNTLAPCTTPTQAAAAGAS

SEQ ID NO: 31832 - DNA, 1590 bp, Arabidopsis thaliana
  misc_feature (1)..(1590): Ceres Seq. ID no. 13588942
gaacttcccactcatagcaaaatgttagctcagtcgcacttcttctctaagtccttcgatctgattccgccacagtctccggcgttgcggtctgcaaatccttctcttcgtatctcttcttcttatagtaacagccgcttatcctttctttcttcttctgcaattgctgttcccgtctcccgccgtcggttttgcctgactatggcttcaaactcaaaacggcctaacataagcaacgagtctccttcggaacttagcgacactgagctggatcgattcgccgctgtgggaaatgcattagctgacgcttccggcgaggttatcagaaagtatttccggaagaaattcgacattgttgataaagatgatatgagccctgttacaatcgctgatcaaatggctgaagaggcaatggtttccattatattccagaatctcccttctcatgctatatatggtgaggagaagggttggagatgcaaagaggaatctgcagactatgtttgggttttggacccaatcgacggaacaaagagctttattacagggaaacccgtgtttggtacgctgattgctctgctctacaaaggtaaaccgattctaggactgattgatcagcctattctaaaagagagatggataggaatgaatggaagaagaactaaactaaacggggaggatatctcaacgcgatcttgccccaaattatcacaagcatatttatacaccactagcccacatcttttcagtgaagaggcagaaaaggcatattctcgagttagagacaaggtgaaagtgcccttatacggctgtgattgttatgcttacgctctcctggcttctggatttgtcgatcttgttattgaatccggtctaaagccatatgatttccttgctctggtgcctgtaatagaaggcgctggaggtaccataaccgattggactggtaaacgatttctgtgggaagcttcatccagtgcagttgcgacaagctttaatgtagttgcagcaggagattcagacattcatcagcaggctttggagtcacttgagtggcattgaaaagattcgctggagaggattatcaaggtactattcaggaaaagcgagatcattcatatgtatctcagatgtaaaatgccttgaggatctgaagaaaccaacccaaacttttgatgacgatgatgatgatgaggcttacaagaagaggaagaagaagaacaagcaatcatcttcatcttcattttctgcagctattaacagcaatgtgaatttctcaaactacccttgtcgaagggtctctagtagcacccactgttcctcaccttgtgttgcttaggaaaaaagaagcttacactttctcaatttatttagtagctcctttggtttttattctcaacccaacactgaaaacacaaacttcagttcagtgtgtgggggcgtcattcatatccaatttttgattttctttactgtttttatgtcttttttttgtggttatctttttttcttgcgcaaattatgtagatttggatgtgtttgttccaatttgcttattgggacaaaaatgttggaaatcctttcgaatgt

SEQ ID NO: 31833 - protein, 353 aa, Arabidopsis thaliana
  misc_feature (1)..(353): Ceres Seq. ID no. 13588943
ELPTHSKMLAQSHFFSKSFDLIPPQSPALRSANPSLRISSSYSNSRLSFLSSSAIAVPVSRRRFCLTMASNSKRPNISNESPSELSDTELDRFAAVGNALADASGEVIRKYFRKKFDIVDKDDMSPVTIADQMAEEAMVSIIFQNLPSHAIYGEEKGWRCKEESADYVWVLDPIDGTKSFITGKPVFGTLIALLYKGKPILGLIDQPILKERWIGMNGRRTKLNGEDISTRSCPKLSQAYLYTTSPHLFSEEAEKAYSRVRDKVKVPLYGCDCYAYALLASGFVDLVIESGLKPYDFLALVPVIEGAGGTITDWTGKRFLWEASSSAVATSFNVVAAGDSDIHQQALESLEWH

SEQ ID NO: 31834 - protein, 346 aa, Arabidopsis thaliana
  misc_feature (1)..(346): Ceres Seq. ID no. 13588944
MLAQSHFFSKSFDLIPPQSPALRSANPSLRISSSYSNSRLSFLSSSAIAVPVSRRRFCLTMASNSKRPNISNESPSELSDTELDRFAAVGNALADASGEVIRKYFRKKFDIVDKDDMSPVTIADQMAEEAMVSIIFQNLPSHAIYGEEKGWRCKEESADYVWVLDPIDGTKSFITGKPVFGTLIALLYKGKPILGLIDQPILKERWIGMNGRRTKLNGEDISTRSCPKLSQAYLYTTSPHLFSEEAEKAYSRVRDKVKVPLYGCDCYAYALLASGFVDLVIESGLKPYDFLALVPVIEGAGGTITDWTGKRFLWEASSSAVATSFNVVAAGDSDIHQQALESLEWH

SEQ ID NO: 31835 - protein, 286 aa, Arabidopsis thaliana
  misc_feature (1)..(286): Ceres Seq. ID no. 13588945
MASNSKRPNISNESPSELSDTELDRFAAVGNALADASGEVIRKYFRKKFDIVDKDDMSPVTIADQMAEEAMVSIIFQNLPSHAIYGEEKGWRCKEESADYVWVLDPIDGTKSFITGKPVFGTLIALLYKGKPILGLIDQPILKERWIGMNGRRTKLNGEDISTRSCPKLSQAYLYTTSPHLFSEEAEKAYSRVRDKVKVPLYGCDCYAYALLASGFVDLVIESGLKPYDFLALVPVIEGAGGTITDWTGKRFLWEASSSAVATSFNVVAAGDSDIHQQALESLEWH

SEQ ID NO: 31836 - DNA, 589 bp, Arabidopsis thaliana
  misc_feature (1)..(589): Ceres Seq. ID no. 13591389
aaaacaaaaaatttcagaaacttatcatataatggatcatggtaacatgccaccatcatcaccatcatcaatggtaaatcataccaattccaacatgatcatgatgcatatgactttcttctggggaaagaacacggagatactcttctccggctggcccgggacaagtctcggcatgtacgttctatgtctcatcgtcgtcttcctccttgctgttatcgtcgagtggcttgcccattcttcgatccttcgtggacgtggctccactagccgcgccaaggggctcgttcagaccgcagtctacacactcaagacaggccttgcttatctcgtgatgctcgccgttatgtcctttaacggtggagttttcattgtcgctatcgccggattcgccgtgggtttcatgctcttcggaagcactgctttcaagaacccctctgatgacgagaaacccttcgaacaactatgatcactctttattttacttggaaagaacatttcgtttgtgtgtatttaatttgcgtttctttgaattttgatattttgtgactagaatttggaattttatgaagaatatagccatttttgc

SEQ ID NO: 31837 - protein, 155 aa, Arabidopsis thaliana
  misc_feature (1)..(155): Ceres Seq. ID no. 13591390
KQKISETYHIMDHGNMPPSSPSSMVNHTNSNMIMMHMTFFWGKNTEILFSGWPGTSLGMYVLCLIVVFLLAVIVEWLAHSSILRGRGSTSRAKGLVQTAVYTLKTGLAYLVMLAVMSFNGGVFIVAIAGFAVGFMLFGSTAFKNPSDDEKPFEQL

SEQ ID NO: 31838 - protein, 145 aa, Arabidopsis thaliana
  misc_feature (1)..(145): Ceres Seq. ID no. 13591391
MDHGNMPPSSPSSMVNHTNSNMIMMHMTFFWGKNTEILFSGWPGTSLGMYVLCLIVVFLLAVIVEWLAHSSILRGRGSTSRAKGLVQTAVYTLKTGLAYLVMLAVMSFNGGVFIVAIAGFAVGFMLFGSTAFKNPSDDEKPFEQL

SEQ ID NO: 31839 - protein, 140 aa, Arabidopsis thaliana
  misc_feature (1)..(140): Ceres Seq. ID no. 13591392
MPPSSPSSMVNHTNSNMIMMHMTFFWGKNTEILFSGWPGTSLGMYVLCLIVVFLLAVIVEWLAHSSILRGRGSTSRAKGLVQTAVYTLKTGLAYLVMLAVMSFNGGVFIVAIAGFAVGFMLFGSTAFKNPSDDEKPFEQL

SEQ ID NO: 31840 - DNA, 532 bp, Arabidopsis thaliana
  misc_feature (1)..(532): Ceres Seq. ID no. 13591397
ttcattcataaatttttcttcaatttgaattttctcgagaaaaatgtcttgctgtggaggaaactgcggatgtggatctggctgcaagtgcggcaacggttgtggaggttgcaaaatgtaccctgacttgggattctccggcgagacaaccacaactgagacttttgtcttgggcgttgcaccggcgatgaagaatcagtacgaggcttcaggggagagtaacaacgctgagaacgatgcttgcaagtgtggatctgactgcaagtgtgatccttgcacctgcaagtgaagaagcctttttaaataagcagagataatcgagtctctttaattaattaagttattcaataagtaaaccatatataggatggtgtttttaggtttggtttatgtgtaataatggcttcagcttatcttttagccgatcattgtcttttgtgtttgttttgatcatatcttttagatgtctagcaactctgccatgtgatgagtttgtacttccagtggaatgataataatattatagttttaa

SEQ ID NO: 31841 - protein, 81 aa, Arabidopsis thaliana
  misc_feature (1)..(81): Ceres Seq. ID no. 13591398
MSCCGGNCGCGSGCKCGNGCGGCKMYPDLGFSGETTTTETFVLGVAPAMKNQYEASGESNNAENDACKCGSDCKCDPCTCK

SEQ ID NO: 31842 - protein, 57 aa, Arabidopsis thaliana
  misc_feature (1)..(57): Ceres Seq. ID no. 13591399
MYPDLGFSGETTTTETFVLGVAPAMKNQYEASGESNNAENDACKCGSDCKCDPCTCK

SEQ ID NO: 31843 - protein, 41 aa, Arabidopsis thaliana
  misc_feature (1)..(41): Ceres Seq. ID no. 13591400
FIHKFFFNLNFLEKNVLLWRKLRMWIWLQVRQRLWRLQNVP

SEQ ID NO: 31844 - DNA, 959 bp, Arabidopsis thaliana
  misc_feature (1)..(959): Ceres Seq. ID no. 13591405
gtaggagaagaaagttctcatttcataattgtatcaaattgtgagaggaaaaaaagaagttcaagaaatggagaaggaaggactcgggcttgagataacggagctgagattggggcttccggggagagatgtggcagagaagatgatgaagaagagagctttcacggagatgaatatgacgtcgtcgggtagtaatagtgatcaatgtgaaagcggcgtcgtttcatctggtggtgacgctgagaaggttaatgattcgccggcggcgaaaagccaggtggtggggtggccaccggtttgttcttaccggaagaaaaacagctgtaaggaagcttcgaccacgaaagtggggttagggtatgtgaaagtgagcatggatggtgtgccttatttgaggaagatggatcttggttcgagccaaggctatgatgatctagcctttgctcttgataagctcttcggtttccgtggcatcggtgtggccttgaaagatggtgacaactgcgaatacgttaccatatacgaagacaaagatggagactggatgctcgccggtgatgtaccttgggggatgtttctagagtcatgcaagaggttgagaataatgaaaagatcggatgctaccgggtttgggctgcagcctagaggagtagacgagtgatgatgacttgaacaagaagcaaggagctggttcattaatttaatcttaaacttgatcatcaagatcctttagaacatttttcctattcatgttatataaatatatatgttatagtatattattttgcaacaaaatttcatgttatggttttgcataattatcttcagaaagacagctatatatatatacactacttgtttcttgagtgttgagttaaaacattaatctgtttcaaaatttattgttatttcggatctatatatgtgtgtagaaacatatgtaataagtatccattatt

SEQ ID NO: 31845 - protein, 197 aa, Arabidopsis thaliana
  misc_feature (1)..(197): Ceres Seq. ID no. 13591406
MEKEGLGLEITELRLGLPGRDVAEKMMKKRAFTEMNMTSSGSNSDQCESGVVSSGGDAEKVNDSPAAKSQVVGWPPVCSYRKKNSCKEASTTKVGLGYVKVSMDGVPYLRKMDLGSSQGYDDLAFALDKLFGFRGIGVALKDGDNCEYVTIYEDKDGDWMLAGDVPWGMFLESCKRLRIMKRSDATGFGLQPRGVDE

SEQ ID NO: 31846 - protein, 172 aa, Arabidopsis thaliana
  misc_feature (1)..(172): Ceres Seq. ID no. 13591407
MMKKRAFTEMNMTSSGSNSDQCESGVVSSGGDAEKVNDSPAAKSQVVGWPPVCSYRKKNSCKEASTTKVGLGYVKVSMDGVPYLRKMDLGSSQGYDDLAFALDKLFGFRGIGVALKDGDNCEYVTIYEDKDGDWMLAGDVPWGMFLESCKRLRIMKRSDATGFGLQPRGVDE

SEQ ID NO: 31847 - protein, 171 aa, Arabidopsis thaliana
  misc_feature (1)..(171): Ceres Seq. ID no. 13591408
MKKRAFTEMNMTSSGSNSDQCESGVVSSGGDAEKVNDSPAAKSQVVGWPPVCSYRKKNSCKEASTTKVGLGYVKVSMDGVPYLRKMDLGSSQGYDDLAFALDKLFGFRGIGVALKDGDNCEYVTIYEDKDGDWMLAGDVPWGMFLESCKRLRIMKRSDATGFGLQPRGVDE

SEQ ID NO: 31848 - DNA, 2709 bp, Arabidopsis thaliana
  misc_feature (1)..(2709): Ceres Seq. ID no. 13591434
atggcttatgctcatgttttcgcttcgttgactatctcgacgatttctctccgacgattcctcccccgacttcatcgaaaccacagcgtaaaacccaattcccgaatcatatgcaatctgaaactaaactactctgctggaaaatttcgcgagatgggactatcacgttccgtggagctagaccaattcatcacaagcgaggaggaagaaggagaagcagaggagataggagaaggatttttcgaagcgattgaggaactagagaggatgactagagaaccatcagatatactcgaagagatgaatcatcgattatcttctagagaattgcaattgatgcttgtttacttcgcacaagaaggtagagattcatggtgtactttagaagtgtttgaatggttgaaaaaggagaatagagttgatgaagagataatggagttaatggtttcgattatgtgtggttgggttaagaaattgattgaagatgaatgtaatgcacaccaagtgttcgacttattgattgagatggattgtgttggtttaaaacctggttttagtatgatggacaaagttattgctttgtattgtgagatggggaagaaagaaagtgcggttttgtttgtcaaggaggttttaagaaggagagatggttttggttatagtgttgttggtggtggtggttctgaaggtagaaaaggtggacctgttgggtatcttgcttggaaatttatggttgatggagattataggaaggcagttgatatggttatggagttaagactttcagggctgaaaccagaagcgtacagctatcttattgcgatgacagctatagtgaaagagctgaatagtcttggaaagacattacgcgagttgaaacgctttgcacgggctggttttgttgctgagattgatgatcacgatagggtactcattgagaagtatcaatcagaaacattatctcgtggactgcagttagcaacttgggcggttgaggaaggccaagaaaatgattccattattggggtggtccatgagaggctactcgctatgtatatatgtgcgggacgtggaccagaagcagagaaacagctctggaagatgaaacttgcagggagagaacctgaagctgacctccacgacattgttatggcgatctgcgcttcacagaaagaggttaatgcagtttctcggctactgacacgagttgagttcatgggatctcagagaaagaagaagactctgtcatggttgctcagagggtatgtgaaaggagggcacttcgaagaggctgcagagacattggtatcgatgatcgactctgggttgcatccggagtatattgatcgagtggctgtgatgcaaggaatgacaaggaagatccaacggccgagagatgttgaagcatatatgagtctgtgcaagaggctctttgacgctggtttgcccaaaacaaaccttaatgacttgaggacatctgtttcctcgtacgtatttctgaaattaagtgaatctgaaggtgaaagcaaagccggaggaagaaataagaatcacagaggtaaaattgtgatggagctcgaagatccaacaatggcagattccacgattaagctaacagtcaaattcggaggcaaatcaataccactttcggtatcaccagattgtacagtcaaagatcttaagtctcagttacaaccaatcaccaacgttcttcctcgtggccagaagctcatcttcaaaggtaaggttttggttgaaacgtcgactttgaaacaatctgatgtgggaagtggagctaaactcatgttaatggcttctcaaggtctgcatcaaggggaaggtccaatacttaaggaagctagtataaggccaatctctagaactgttgtatctgataaagtagatcagagaaagcctagtgtacttgtagacaagaaccgcactgatcgatggaaagccacaggagttattgctttagctcaagccaatttgaaggaaatacctgaagaagtgtgggactgtggatctggagtcagagtacttgacattagtgaaaacttcattaaagaagtacctgccaaaatcagctcctttggttctatgcagaaattgttccttcaaggaaatggtctgtccgatgaatccattcaatgggaagggatagcatctctgaagcgcctgatgcttctgtccattagccataacaatctaactgttctgccatcagcaatgggttcactgacgtctcttagacagcttgatgtcaccaacaacaagttgacaagtctaccgaatgagttaggacttctgacgcagcttgagattttgaaagccaacaacaacagaataactagtcttcctgagagtatcggaaactgttcattcctcatggaggttgatctttcagctaatattatatcagaacttcccgagacattcaccaaactgcgtaatctaaagtgtttcggtattcagacgctggagctgaataacacgggattgaagacgctgccatcggctttatttaagatgtgtttgcagctctcaactttaggtctccacaacacagagataaccgttgaatttctccgccagttcgagggatatgatgattttgatgaaagaagacgtaccaagcatcaaaagcagcttgattttcgtgttgtgggatctggccaattcgacgaaggcgctgataaatcttggtga

SEQ ID NO: 31849 - protein, 902 aa, Arabidopsis thaliana
  misc_feature (1)..(902): Ceres Seq. ID no. 13591435
MAYAHVFASLTISTISLRRFLPRLHRNHSVKPNSRIICNLKLNYSAGKFREMGLSRSVELDQFITSEEEEGEAEEIGEGFFEAIEELERMTREPSDILEEMNHRLSSRELQLMLVYFAQEGRDSWCTLEVFEWLKKENRVDEEIMELMVSIMCGWVKKLIEDECNAHQVFDLLIEMDCVGLKPGFSMMDKVIALYCEMGKKESAVLFVKEVLRRRDGFGYSVVGGGGSEGRKGGPVGYLAWKFMVDGDYRKAVDMVMELRLSGLKPEAYSYLIAMTAIVKELNSLGKTLRELKRFARAGFVAEIDDHDRVLIEKYQSETLSRGLQLATWAVEEGQENDSIIGVVHERLLAMYICAGRGPEAEKQLWKMKLAGREPEADLHDIVMAICASQKEVNAVSRLLTRVEFMGSQRKKKTLSWLLRGYVKGGHFEEAAETLVSMIDSGLHPEYIDRVAVMQGMTRKIQRPRDVEAYMSLCKRLFDAGLPKTNLNDLRTSVSSYVFLKLSESEGESKAGGRNKNHRGKIVMELEDPTMADSTIKLTVKFGGKSIPLSVSPDCTVKDLKSQLQPITNVLPRGQKLIFKGKVLVETSTLKQSDVGSGAKLMLMASQGLHQGEGPILKEASIRPISRTVVSDKVDQRKPSVLVDKNRTDRWKATGVIALAQANLKEIPEEVWDCGSGVRVLDISENFIKEVPAKISSFGSMQKLFLQGNGLSDESIQWEGIASLKRLMLLSISHNNLTVLPSAMGSLTSLRQLDVTNNKLTSLPNELGLLTQLEILKANNNRITSLPESIGNCSFLMEVDLSANIISELPETFTKLRNLKCFGIQTLELNNTGLKTLPSALFKMCLQLSTLGLHNTEITVEFLRQFEGYDDFDERRRTKHQKQLDFRVVGSGQFDEGADKSW

SEQ ID NO: 31850 - protein, 851 aa, Arabidopsis thaliana
  misc_feature (1)..(851): Ceres Seq. ID no. 13591436
MGLSRSVELDQFITSEEEEGEAEEIGEGFFEAIEELERMTREPSDILEEMNHRLSSRELQLMLVYFAQEGRDSWCTLEVFEWLKKENRVDEEIMELMVSIMCGWVKKLIEDECNAHQVFDLLIEMDCVGLKPGFSMMDKVIALYCEMGKKESAVLFVKEVLRRRDGFGYSVVGGGGSEGRKGGPVGYLAWKFMVDGDYRKAVDMVMELRLSGLKPEAYSYLIAMTAIVKELNSLGKTLRELKRFARAGFVAEIDDHDRVLIEKYQSETLSRGLQLATWAVEEGQENDSIIGVVHERLLAMYICAGRGPEAEKQLWKMKLAGREPEADLHDIVMAICASQKEVNAVSRLLTRVEFMGSQRKKKTLSWLLRGYVKGGHFEEAAETLVSMIDSGLHPEYIDRVAVMQGMTRKIQRPRDVEAYMSLCKRLFDAGLPKTNLNDLRTSVSSYVFLKLSESEGESKAGGRNKNHRGKIVMELEDPTMADSTIKLTVKFGGKSIPLSVSPDCTVKDLKSQLQPITNVLPRGQKLIFKGKVLVETSTLKQSDVGSGAKLMLMASQGLHQGEGPILKEASIRPISRTVVSDKVDQRKPSVLVDKNRTDRWKATGVIALAQANLKEIPEEVWDCGSGVRVLDISENFIKEVPAKISSFGSMQKLFLQGNGLSDESIQWEGIASLKRLMLLSISHNNLTVLPSAMGSLTSLRQLDVTNNKLTSLPNELGLLTQLEILKANNNRITSLPESIGNCSFLMEVDLSANIISELPETFTKLRNLKCFGIQTLELNNTGLKTLPSALFKMCLQLSTLGLHNTEITVEFLRQFEGYDDFDERRRTKHQKQLDFRVVGSGQFDEGADKSW

SEQ ID NO: 31851 - protein, 813 aa, Arabidopsis thaliana
  misc_feature (1)..(813): Ceres Seq. ID no. 13591437
MTREPSDILEEMNHRLSSRELQLMLVYFAQEGRDSWCTLEVFEWLKKENRVDEEIMELMVSIMCGWVKKLIEDECNAHQVFDLLIEMDCVGLKPGFSMMDKVIALYCEMGKKESAVLFVKEVLRRRDGFGYSVVGGGGSEGRKGGPVGYLAWKFMVDGDYRKAVDMVMELRLSGLKPEAYSYLIAMTAIVKELNSLGKTLRELKRFARAGFVAEIDDHDRVLIEKYQSETLSRGLQLATWAVEEGQENDSIIGVVHERLLAMYICAGRGPEAEKQLWKMKLAGREPEADLHDIVMAICASQKEVNAVSRLLTRVEFMGSQRKKKTLSWLLRGYVKGGHFEEAAETLVSMIDSGLHPEYIDRVAVMQGMTRKIQRPRDVEAYMSLCKRLFDAGLPKTNLNDLRTSVSSYVFLKLSESEGESKAGGRNKNHRGKIVMELEDPTMADSTIKLTVKFGGKSIPLSVSPDCTVKDLKSQLQPITNVLPRGQKLIFKGKVLVETSTLKQSDVGSGAKLMLMASQGLHQGEGPILKEASIRPISRTVVSDKVDQRKPSVLVDKNRTDRWKATGVIALAQANLKEIPEEVWDCGSGVRVLDISENFIKEVPAKISSFGSMQKLFLQGNGLSDESIQWEGIASLKRLMLLSISHNNLTVLPSAMGSLTSLRQLDVTNNKLTSLPNELGLLTQLEILKANNNRITSLPESIGNCSFLMEVDLSANIISELPETFTKLRNLKCFGIQTLELNNTGLKTLPSALFKMCLQLSTLGLHNTEITVEFLRQFEGYDDFDERRRTKHQKQLDFRVVGSGQFDEGADKSW

SEQ ID NO: 31852 - DNA, 2263 bp, Arabidopsis thaliana
  misc_feature (1)..(2263): Ceres Seq. ID no. 13591438
accatcttcttcttcaatggaaactccggattaaatgacacttctgtaacttcctatatttactaaaatgccatctcgcctctctccgccagatattccgccgctgcaaccgacgcctacggttagtgacggccatcatcgtttccagactcttccacttatcatagccggttctctgactttaaccggagttttactcatcctcgtcactttacttatttaccgaagactctaccgaaaccgtacggctccttcagatcttatctccaactccaagtctcctcaacactaccaatgtcgacgcttctcttactctcagctccgccgcgctacaaactctttctccgagtcgactcacctcggtcacggcggattcggctctgtttacaaagctgatttcccgagtggcggcgattcactcgccgtcaaagtcatggatacctccgctggttctttacaaggcgaacgtgagtttcacaacgagctttctctctcttctcacttaattggctctcctcatgtcgtctctctccttggattctcctccgatcgtcgtggtcggaagcttatcctcgtctacgaacttatggctaatcgtagtttacaagacgcgcttttggatcgcaaatgtgtggagcttatggattggaacaaaaggtttgagattgccacggatatagcaaaaggcatcgagtttcttcaccattgttgtgatccaattataatccatggagatattaaacctagtaacatccttctcgattctgatttcaaagccaaaatcggagatttcggtctcgcgagagtaaagtcggaggatttcgatactaggattctgattgaggaagaagataagagcaaggatgttgttgaagataatgggtcgattcttgaggagactgaaagcgtgattactgtgtttgaagaaggtaataatgttgtcaatctctcgccggagacttgtgggattagtgtcttgacagagacggtggcctctccgggtgaaaaatctggactttcgccagagaattgtgcagtgagcattttgacggtggaggtgggagcagcatctccggcgatggcatcgataccgtcaccggagacttgtgcgattagcgttttgacggatactggattgtcaccggaaagtagcaagcttaaagtgggatcgaagagagattggtggtggaaacaggacaacaatggtggaagcagaggagggattgaatcagggagtgtgaaggattacgtgatggaatggattgggagtgagattaagaaagagagacctagcaacaataaggaatggatcaacaatggtgatgggtcatcatcagtctctaagaagaagaagaaagagaagaagagaaagcctagagagtggtggaaggaagagttttgtgaagagctgactagaaagaagaggaaaaagaagaagaagaagaaaagagggttaagctcaatctcaagcattgactcttggtttcatagagacgatggtgcttcctctgttcatgaccacaatcttaatcctaccaagaggaagaagaggaatagtatagattggtgggtagatgggttaagtggggagctgaagtcagtcatgggtaaaaaaaacagtcaagattctggtttgtggtgtgatgtgaatgttcagaagagtggtggagtcagcagcacaccgagtatgagaggtacggtgtgttacattgcaccagaatgtggaggaggaggtgtgttgtctgagaaatgcgatgtttatagttttggggttctgcttttggttcttgtctcaggaagacggccattgcaggtgactgcttcgccgatgtcggagtttgagagggctaacttgatttcatgggctaagcaattagcttgcaatggtaaattgttggagttagttgataaatctatacactctttggagaaagagcaagcggttctttgtattactattgcattgctttgtctgcaaagatctccggttaagagaccaacgatgaaggagattgttgagatgctttcgggtgtgtctgagccaccgcatttgccgtttgagttctcaccctcgccgcctatgggttttccgtttaagtcaaggaagaaagcacggtgaaattcgggtttggttatgacttatgagctcagtcatcaagtgtaggatttttccggtccaaagctaaaccaattgcgagttgtaggaactatttgattccgtaagattagctttttgcaaatatttatgaatatttagttgctt

SEQ ID NO: 31853 - protein, 683 aa, Arabidopsis thaliana
  misc_feature (1)..(683): Ceres Seq. ID no. 13591439
MPSRLSPPDIPPLQPTPTVSDGHHRFQTLPLIIAGSLTLTGVLLILVTLLIYRRLYRNRTAPSDLISNSKSPQHYQCRRFSYSQLRRATNSFSESTHLGHGGFGSVYKADFPSGGDSLAVKVMDTSAGSLQGEREFHNELSLSSHLIGSPHVVSLLGFSSDRRGRKLILVYELMANRSLQDALLDRKCVELMDWNKRFEIATDIAKGIEFLHHCCDPIIIHGDIKPSNILLDSDFKAKIGDFGLARVKSEDFDTRILIEEEDKSKDVVEDNGSILEETESVITVFEEGNNVVNLSPETCGISVLTETVASPGEKSGLSPENCAVSILTVEVGAASPAMASIPSPETCAISVLTDTGLSPESSKLKVGSKRDWWWKQDNNGGSRGGIESGSVKDYVMEWIGSEIKKERPSNNKEWINNGDGSSSVSKKKKKEKKRKPREWWKEEFCEELTRKKRKKKKKKKRGLSSISSIDSWFHRDDGASSVHDHNLNPTKRKKRNSIDWWVDGLSGELKSVMGKKNSQDSGLWCDVNVQKSGGVSSTPSMRGTVCYIAPECGGGGVLSEKCDVYSFGVLLLVLVSGRRPLQVTASPMSEFERANLISWAKQLACNGKLLELVDKSIHSLEKEQAVLCITIALLCLQRSPVKRPTMKEIVEMLSGVSEPPHLPFEFSPSPPMGFPFKSRKKAR

SEQ ID NO: 31854 - protein, 561 aa, Arabidopsis thaliana
  misc_feature (1)..(561): Ceres Seq. ID no. 13591440
MDTSAGSLQGEREFHNELSLSSHLIGSPHVVSLLGFSSDRRGRKLILVYELMANRSLQDALLDRKCVELMDWNKRFEIATDIAKGIEFLHHCCDPIIIHGDIKPSNILLDSDFKAKIGDFGLARVKSEDFDTRILIEEEDKSKDVVEDNGSILEETESVITVFEEGNNVVNLSPETCGISVLTETVASPGEKSGLSPENCAVSILTVEVGAASPAMASIPSPETCAISVLTDTGLSPESSKLKVGSKRDWWWKQDNNGGSRGGIESGSVKDYVMEWIGSEIKKERPSNNKEWINNGDGSSSVSKKKKKEKKRKPREWWKEEFCEELTRKKRKKKKKKKRGLSSISSIDSWFHRDDGASSVHDHNLNPTKRKKRNSIDWWVDGLSGELKSVMGKKNSQDSGLWCDVNVQKSGGVSSTPSMRGTVCYIAPECGGGGVLSEKCDVYSFGVLLLVLVSGRRPLQVTASPMSEFERANLISWAKQLACNGKLLELVDKSIHSLEKEQAVLCITIALLCLQRSPVKRPTMKEIVEMLSGVSEPPHLPFEFSPSPPMGFPFKSRKKAR

SEQ ID NO: 31855 - protein, 510 aa, Arabidopsis thaliana
  misc_feature (1)..(510): Ceres Seq. ID no. 13591441
MANRSLQDALLDRKCVELMDWNKRFEIATDIAKGIEFLHHCCDPIIIHGDIKPSNILLDSDFKAKIGDFGLARVKSEDFDTRILIEEEDKSKDVVEDNGSILEETESVITVFEEGNNVVNLSPETCGISVLTETVASPGEKSGLSPENCAVSILTVEVGAASPAMASIPSPETCAISVLTDTGLSPESSKLKVGSKRDWWWKQDNNGGSRGGIESGSVKDYVMEWIGSEIKKERPSNNKEWINNGDGSSSVSKKKKKEKKRKPREWWKEEFCEELTRKKRKKKKKKKRGLSSISSIDSWFHRDDGASSVHDHNLNPTKRKKRNSIDWWVDGLSGELKSVMGKKNSQDSGLWCDVNVQKSGGVSSTPSMRGTVCYIAPECGGGGVLSEKCDVYSFGVLLLVLVSGRRPLQVTASPMSEFERANLISWAKQLACNGKLLELVDKSIHSLEKEQAVLCITIALLCLQRSPVKRPTMKEIVEMLSGVSEPPHLPFEFSPSPPMGFPFKSRKKAR

SEQ ID NO: 31856 - DNA, 2254 bp, Arabidopsis thaliana
  misc_feature (1)..(2254): Ceres Seq. ID no. 13591474
ggtggtagtagcagtgaaaaacaaaagcaatccaatcccaaacccatttgctcttaagattcttcacatagagaagtcacatgttccttcttcttcttccttcatcatccccaaacacacacaaactaaaaaaaaggcaaaaccctagatccaagatcagacctaatctaatcgaaactcatagctgaaaaatgaagagagatcatcaccaattccaaggtcgattgtccaaccacgggacttcttcttcttcatcatcaatctctaaagataagatgatgatggtgaaaaaagaagaagacggtggaggtaacatggacgacgagcttctcgctgttttaggttacaaagttaggtcatcggagatggcggaggttgctttgaaactcgaacaattagagacgatgatgagtaatgttcaagaagatggtttatctcatctcgcgacggatactgttcattataatccgtcggagctttattcttggcttgataatatgctctctgagcttaatcctcctcctcttccggcgagttctaacggtttagatccggttcttccttcgccggagatttgtggttttccggcttcggattatgaccttaaagtcattcccggaaacgcgatttatcagtttccggcgattgattcttcgtcttcgtcgaataatcagaacaagcgtttgaaatcatgctcgagtcctgattctatggttacatcgacttcgacgggtacgcagattggtggagtcataggaacgacggtgacgacaaccaccacgacaacgacggcggcgggtgagtcaactcgttctgttatcctggttgactcgcaagagaacggtgttcgtttagtccacgcgcttatggcttgtgcagaagcaatccagcagaacaatttgactctagcggaagctcttgtgaagcaaatcggatgcttagctgtgtctcaagccggagctatgagaaaagtggctacttacttcgccgaagctttagcgcggcggatctaccgtctctctccgccgcagaatcagatcgatcattgtctctccgatactcttcagatgcacttttacgagacttgtccttatcttaaattcgctcacttcacggcgaaccaagcgattctcgaagcttttgaaggtaagaagagagtacacgtcattgatttctcgatgaaccaaggtcttcaatggcctgcacttatgcaagctcttgcgcttcgagaaggaggtcctccaactttccggttaaccggaattggtccaccggcgccggataattctgatcatcttcatgaagttggttgtaaattagctcagcttgcggaggcgattcacgtagaattcgaataccgtggattcgttgctaacagcttagccgatctcgatgcttcgatgcttgagcttagaccgagcgatacggaagctgttgcggtgaactctgtttttgagctacataagctcttaggtcgtcccggtgggatagagaaagttctcggcgttgtgaaacagattaaaccggtgattttcacggtggttgagcaagaatcgaaccataacggaccggttttcttagaccggtttactgaatcgttacattattattcgactctgtttgattcgttggaaggagttccgaatagtcaagacaaagtcatgtctgaagtttacttagggaaacagatttgtaatctggtggcttgtgaaggtcctgacagagtcgagagacacgaaacgttgagtcaatggggaaaccggtttggttcgtccggtttagcgccggcacatcttgggtctaacgcgtttaagcaagcgagtatgcttttgtctgtgtttaatagtggccaaggttatcgtgtggaggagagtaatggatgtttgatgttgggttggcacactcgtccactcattaccacctccgcttggaaactctcgacggcggcgtactgagtttgactcgaagcatacgacggtggtggagtcgagtcgagtgaatttgagattgagatcagtggaccggtgatgacatatgttcggaccaagacctaaaccgaactgaatcgaaccgttttgccttttgtttattttatttattttcgttcacttgtttaaaattcttatatatatcgctttggtaggtcatttttaatttatgcctttttgggatcaatttttaataggctgagtttgtatttattaataaattatctttatgaattttaaactaaaactatgttttaatctcatcc

SEQ ID NO: 31857 - protein, 587 aa, Arabidopsis thaliana
  misc_feature (1)..(587): Ceres Seq. ID no. 13591475
MKRDHHQFQGRLSNHGTSSSSSSISKDKMMMVKKEEDGGGNMDDELLAVLGYKVRSSEMAEVALKLEQLETMMSNVQEDGLSHLATDTVHYNPSELYSWLDNMLSELNPPPLPASSNGLDPVLPSPEICGFPASDYDLKVIPGNAIYQFPAIDSSSSSNNQNKRLKSCSSPDSMVTSTSTGTQIGGVIGTTVTTTTTTTTAAGESTRSVILVDSQENGVRLVHALMACAEAIQQNNLTLAEALVKQIGCLAVSQAGAMRKVATYFAEALARRIYRLSPPQNQIDHCLSDTLQMHFYETCPYLKFAHFTANQAILEAFEGKKRVHVIDFSMNQGLQWPALMQALALREGGPPTFRLTGIGPPAPDNSDHLHEVGCKLAQLAEAIHVEFEYRGFVANSLADLDASMLELRPSDTEAVAVNSVFELHKLLGRPGGIEKVLGVVKQIKPVIFTVVEQESNHNGPVFLDRFTESLHYYSTLFDSLEGVPNSQDKVMSEVYLGKQICNLVACEGPDRVERHETLSQWGNRFGSSGLAPAHLGSNAFKQASMLLSVFNSGQGYRVEESNGCLMLGWHTRPLITTSAWKLSTAAY

SEQ ID NO: 31858 - protein, 559 aa, Arabidopsis thaliana
  misc_feature (1)..(559): Ceres Seq. ID no. 13591476
MMMVKKEEDGGGNMDDELLAVLGYKVRSSEMAEVALKLEQLETMMSNVQEDGLSHLATDTVHYNPSELYSWLDNMLSELNPPPLPASSNGLDPVLPSPEICGFPASDYDLKVIPGNAIYQFPAIDSSSSSNNQNKRLKSCSSPDSMVTSTSTGTQIGGVIGTTVTTTTTTTTAAGESTRSVILVDSQENGVRLVHALMACAEAIQQNNLTLAEALVKQIGCLAVSQAGAMRKVATYFAEALARRIYRLSPPQNQIDHCLSDTLQMHFYETCPYLKFAHFTANQAILEAFEGKKRVHVIDFSMNQGLQWPALMQALALREGGPPTFRLTGIGPPAPDNSDHLHEVGCKLAQLAEAIHVEFEYRGFVANSLADLDASMLELRPSDTEAVAVNSVFELHKLLGRPGGIEKVLGVVKQIKPVIFTVVEQESNHNGPVFLDRFTESLHYYSTLFDSLEGVPNSQDKVMSEVYLGKQICNLVACEGPDRVERHETLSQWGNRFGSSGLAPAHLGSNAFKQASMLLSVFNSGQGYRVEESNGCLMLGWHTRPLITTSAWKLSTAAY

SEQ ID NO: 31859 - protein, 558 aa, Arabidopsis thaliana
  misc_feature (1)..(558): Ceres Seq. ID no. 13591477
MMVKKEEDGGGNMDDELLAVLGYKVRSSEMAEVALKLEQLETMMSNVQEDGLSHLATDTVHYNPSELYSWLDNMLSELNPPPLPASSNGLDPVLPSPEICGFPASDYDLKVIPGNAIYQFPAIDSSSSSNNQNKRLKSCSSPDSMVTSTSTGTQIGGVIGTTVTTTTTTTTAAGESTRSVILVDSQENGVRLVHALMACAEAIQQNNLTLAEALVKQIGCLAVSQAGAMRKVATYFAEALARRIYRLSPPQNQIDHCLSDTLQMHFYETCPYLKFAHFTANQAILEAFEGKKRVHVIDFSMNQGLQWPALMQALALREGGPPTFRLTGIGPPAPDNSDHLHEVGCKLAQLAEAIHVEFEYRGFVANSLADLDASMLELRPSDTEAVAVNSVFELHKLLGRPGGIEKVLGVVKQIKPVIFTVVEQESNHNGPVFLDRFTESLHYYSTLFDSLEGVPNSQDKVMSEVYLGKQICNLVACEGPDRVERHETLSQWGNRFGSSGLAPAHLGSNAFKQASMLLSVFNSGQGYRVEESNGCLMLGWHTRPLITTSAWKLSTAAY

SEQ ID NO: 31860 - DNA, 2611 bp, Arabidopsis thaliana
  misc_feature (1)..(2611): Ceres Seq. ID no. 13591498
agtctctctaatgattccttcgtacgcatcctcatcttcttcttcttctctcttctactgtatttaaacactctctcgtcttctccttggatccagagagagacacaacacaccatctcaatcatgtcttcttcgtttctctcctccactgctttcttcctcctcctttgtctaggattctgccacgtgtcctcttcctcctccgaccaaggaacttacatcgttcacatggctaaatctcagatgccgtcgtctttcgacctccactctaactggtacgattcatctctcagatctatctccgactcagccgaattgctctacacttacgagaacgcgattcatggattctcaacacggctaactcaagaagaagccgactcgctcatgactcaacctggtgttatctccgttttaccggagcaccgttacgagctacacaccactcgtactcctctcttcctcggtctcgacgaacacaccgcagatctgttccctgaagccggctcttacagcgacgtcgtcgtcggagttctcgataccggagtttggcccgagagtaaaagctactccgacgaaggattcggtcctattccttcctcctggaaaggcggatgcgaggccggaaccaatttcaccgcttctctctgtaaccgtaaactaatcggagcaagattcttcgctcgtggttacgaatcaacgatgggaccaatcgatgaatctaaagaatcaagatctcctagagacgacgacggtcacggaactcacacctcatcgaccgccgctggatccgtcgttgaaggagctagcttattaggctacgcttcaggaacagctcgtggtatggctccacgcgctcgtgtcgctgtttacaaagtctgttggctcggtggttgtttcagctcagatattttagctgcaatcgataaagccatcgccgataacgtcaatgtcctgtcgatgtcactcggcggtggaatgtcggattattatagagacggtgttgcgatcggagcattcgccgccatggaaagagggattttagtatcttgctcagctggtaatgctggtccgagtagttctagtttatcaaacgtagctccatggatcacaactgttggtgctggtactttagatcgtgattttccggcgcttgcgattctcggtaacggcaagaatttcaccggagtttctttgtttaaaggagaagctttaccggataaattgttgccgtttatttacgctgggaatgctagtaatgctactaatggtaatctctgtatgaccggaactttgatcccggagaaagtaaaggggaagattgtgatgtgtgatagaggaattaatgctagagttcagaaaggtgatgtggttaaagcagcaggtggagttggaatgattctggctaacactgcggcgaatggtgaagagcttgttgcggatgctcatttgttaccggcgaccaccgttggtgaaaaagccggtgatataatccggcattacgtgactactgatcctaatcccaccgcttcgatttcaatcttaggaacagtcgtcggtgttaaaccatctccggttgtcgcagcgtttagctcacgtggaccgaattcgattacaccgaatattcttaaaccggatctgatcgctcctggagtaaacatcctcgccgcgtggaccggtgctgctggaccaaccggactcgcttccgattctcgccgcgtggagttcaatatcatctctgggacgtcgatgtcttgccctcacgttagtggtttagcggcgcttctcaagtcggtgcatcctgaatggagcccggcggcgattagatcggcgcttatgaccaccgcttacaaaacctacaaagacggtaaaccgttactcgacatcgcgacagggaagccttcgacgccgttcgatcacggtgcaggacacgtgtcaccaacaactgccactaatccaggactcatctacgatctaacgacggaggattacttaggcttcctctgcgcattgaattacacatcgccgcaaattcgaagtgtctcgagacgtaattacacttgcgatccgagtaaatcgtactcggtcgctgatttgaactacccgtcgttcgccgttaacgttgatggagtcggtgcgtataagtacacgcgcacggtgacgagcgtgggaggagctgggacttactcggttaaagtaacttcggagacgacaggagtcaagatttcggttgaaccggcggttttgaatttcaaggaagctaacgagaaaaaatcgtatacggtgacgtttactgtagactcgtcgaagccgtctggatctaacagctttgggagtattgaatggtcggatgggaaacacgtggtgggaagtcccgtggcgattagctggacatagtcgtaaattatgagaaatgaaaggggttttatggaaaagaaaaggtgtttacagatttattgtaatgccgtttttagatacgaagaaacctctgtttagcaaaaacgacatgcagtctgttaagacttgcctagtttgtttttgggatgtcttgctgtttttaattttaaaaagaaatatattctccggctacaacagtagctgggtctctcta

SEQ ID NO: 31861 - protein, 798 aa, Arabidopsis thaliana
  misc_feature (1)..(798): Ceres Seq. ID no. 13591499
SLSNDSFVRILIFFFFSLLLYLNTLSSSPWIQRETQHTISIMSSSFLSSTAFFLLLCLGFCHVSSSSSDQGTYIVHMAKSQMPSSFDLHSNWYDSSLRSISDSAELLYTYENAIHGFSTRLTQEEADSLMTQPGVISVLPEHRYELHTTRTPLFLGLDEHTADLFPEAGSYSDVVVGVLDTGVWPESKSYSDEGFGPIPSSWKGGCEAGTNFTASLCNRKLIGARFFARGYESTMGPIDESKESRSPRDDDGHGTHTSSTAAGSVVEGASLLGYASGTARGMAPRARVAVYKVCWLGGCFSSDILAAIDKAIADNVNVLSMSLGGGMSDYYRDGVAIGAFAAMERGILVSCSAGNAGPSSSSLSNVAPWITTVGAGTLDRDFPALAILGNGKNFTGVSLFKGEALPDKLLPFIYAGNASNATNGNLCMTGTLIPEKVKGKIVMCDRGINARVQKGDVVKAAGGVGMILANTAANGEELVADAHLLPATTVGEKAGDIIRHYVTTDPNPTASISILGTVVGVKPSPVVAAFSSRGPNSITPNILKPDLIAPGVNILAAWTGAAGPTGLASDSRRVEFNIISGTSMSCPHVSGLAALLKSVHPEWSPAAIRSALMTTAYKTYKDGKPLLDIATGKPSTPFDHGAGHVSPTTATNPGLIYDLTTEDYLGFLCALNYTSPQIRSVSRRNYTCDPSKSYSVADLNYPSFAVNVDGVGAYKYTRTVTSVGGAGTYSVKVTSETTGVKISVEPAVLNFKEANEKKSYTVTFTVDSSKPSGSNSFGSIEWSDGKHVVGSPVAISWT

SEQ ID NO: 31862 - protein, 757 aa, Arabidopsis thaliana
  misc_feature (1)..(757): Ceres Seq. ID no. 13591500
MSSSFLSSTAFFLLLCLGFCHVSSSSSDQGTYIVHMAKSQMPSSFDLHSNWYDSSLRSISDSAELLYTYENAIHGFSTRLTQEEADSLMTQPGVISVLPEHRYELHTTRTPLFLGLDEHTADLFPEAGSYSDVVVGVLDTGVWPESKSYSDEGFGPIPSSWKGGCEAGTNFTASLCNRKLIGARFFARGYESTMGPIDESKESRSPRDDDGHGTHTSSTAAGSVVEGASLLGYASGTARGMAPRARVAVYKVCWLGGCFSSDILAAIDKAIADNVNVLSMSLGGGMSDYYRDGVAIGAFAAMERGILVSCSAGNAGPSSSSLSNVAPWITTVGAGTLDRDFPALAILGNGKNFTGVSLFKGEALPDKLLPFIYAGNASNATNGNLCMTGTLIPEKVKGKIVMCDRGINARVQKGDVVKAAGGVGMILANTAANGEELVADAHLLPATTVGEKAGDIIRHYVTTDPNPTASISILGTVVGVKPSPVVAAFSSRGPNSITPNILKPDLIAPGVNILAAWTGAAGPTGLASDSRRVEFNIISGTSMSCPHVSGLAALLKSVHPEWSPAAIRSALMTTAYKTYKDGKPLLDIATGKPSTPFDHGAGHVSPTTATNPGLIYDLTTEDYLGFLCALNYTSPQIRSVSRRNYTCDPSKSYSVADLNYPSFAVNVDGVGAYKYTRTVTSVGGAGTYSVKVTSETTGVKISVEPAVLNFKEANEKKSYTVTFTVDSSKPSGSNSFGSIEWSDGKHVVGSPVAISWT

SEQ ID NO: 31863 - protein, 722 aa, Arabidopsis thaliana
  misc_feature (1)..(722): Ceres Seq. ID no. 13591501
MAKSQMPSSFDLHSNWYDSSLRSISDSAELLYTYENAIHGFSTRLTQEEADSLMTQPGVISVLPEHRYELHTTRTPLFLGLDEHTADLFPEAGSYSDVVVGVLDTGVWPESKSYSDEGFGPIPSSWKGGCEAGTNFTASLCNRKLIGARFFARGYESTMGPIDESKESRSPRDDDGHGTHTSSTAAGSVVEGASLLGYASGTARGMAPRARVAVYKVCWLGGCFSSDILAAIDKAIADNVNVLSMSLGGGMSDYYRDGVAIGAFAAMERGILVSCSAGNAGPSSSSLSNVAPWITTVGAGTLDRDFPALAILGNGKNFTGVSLFKGEALPDKLLPFIYAGNASNATNGNLCMTGTLIPEKVKGKIVMCDRGINARVQKGDVVKAAGGVGMILANTAANGEELVADAHLLPATTVGEKAGDIIRHYVTTDPNPTASISILGTVVGVKPSPVVAAFSSRGPNSITPNILKPDLIAPGVNILAAWTGAAGPTGLASDSRRVEFNIISGTSMSCPHVSGLAALLKSVHPEWSPAAIRSALMTTAYKTYKDGKPLLDIATGKPSTPFDHGAGHVSPTTATNPGLIYDLTTEDYLGFLCALNYTSPQIRSVSRRNYTCDPSKSYSVADLNYPSFAVNVDGVGAYKYTRTVTSVGGAGTYSVKVTSETTGVKISVEPAVLNFKEANEKKSYTVTFTVDSSKPSGSNSFGSIEWSDGKHVVGSPVAISWT

SEQ ID NO: 31864 - DNA, 1529 bp, Arabidopsis thaliana
  misc_feature (1)..(1529): Ceres Seq. ID no. 13591513
gaacaatctctcatctttagcatagttgtgttatcttcttcttcatcacaatttttctacggtcagagattcaaaagagttctttctctctatcttattctccgatcatcatgatgcagcagccaccacccggaggtatccttccacatcacgctcctcctccttctgcgcaacaacagtacggttaccaacaaccttacgggattgctggagctgctccaccaccaccacagatgtggaatcctcaagcggcggcgccgccatcagttcagcctacgaccgctgacgagatccggactctttggatcggggacttacagtattggatggatgagaatttcctctacggttgctttgctcataccggagagatggtttctgctaaagtgattcgtaacaagcaaaccggtcaagttgaaggatacggtttcattgaattcgcatctcatgctgctgctgaaagagttctacaaacattcaacaacgctcctatcccgagctttcctgatcagctctttagactgaactgggcatcattgagttcaggagataaacgagacgattcaccggactacacgatatttgtcggtgatctggctgctgatgttacggattatatcttacttgagacgttcagagcctcttatccgtcagtgaagggtgcaaaggttgttattgacagagtcactggacgtacaaaaggatatgggtttgttaggttttctgatgaaagtgaacagatccgtgctatgacggagatgaatggcgttccttgttctactagacctatgagaattggtcccgctgctagcaagaaaggtgtaactggtcaaagagattcataccagagctctgctgcaggggtaacaactgataatgatccaaataacacaactgtttttgttggtggattagatgcatctgtcacggatgatcatctgaagaatgtctttagccaatatggtgagattgtgcatgtgaaaatacccgctggaaagcgctgtggattcgttcagttttccgagaagagctgtgcagaggaagctcttagaatgctgaatggagtgcaattaggcggaacaaccgtcaggctctcatggggccgaagtccttcgaacaaacagtcgggggatccgagccagttttactacggtgggtatggacaaggacaggagcagtatgggtacacgatgcctcaagaccctaatgcatattacggaggctactctggtggaggatacagcggtggttaccagcagacaccacaggcaggacagcaaccaccacaacagccaccacagcagcaacaagtcgggtttagctactaaccccgagagtattgcttgagttaatgtcactctgcttgttgtttgcgtactttgttatgaacttgtttctgcgtgccttgttatgaatattttcccaaacacagtttatttgtctttgcttttctctaggtgtgtgttgagtttttaactcttaataatgtttctgcgatgcttctgtttttaatgttttcatcacctttt

SEQ ID NO: 31865 - protein, 405 aa, Arabidopsis thaliana
  misc_feature (1)..(405): Ceres Seq. ID no. 13591514
MMQQPPPGGILPHHAPPPSAQQQYGYQQPYGIAGAAPPPPQMWNPQAAAPPSVQPTTADEIRTLWIGDLQYWMDENFLYGCFAHTGEMVSAKVIRNKQTGQVEGYGFIEFASHAAAERVLQTFNNAPIPSFPDQLFRLNWASLSSGDKRDDSPDYTIFVGDLAADVTDYILLETFRASYPSVKGAKVVIDRVTGRTKGYGFVRFSDESEQIRAMTEMNGVPCSTRPMRIGPAASKKGVTGQRDSYQSSAAGVTTDNDPNNTTVFVGGLDASVTDDHLKNVFSQYGEIVHVKIPAGKRCGFVQFSEKSCAEEALRMLNGVQLGGTTVRLSWGRSPSNKQSGDPSQFYYGGYGQGQEQYGYTMPQDPNAYYGGYSGGGYSGGYQQTPQAGQQPPQQPPQQQQVGFSY

SEQ ID NO: 31866 - protein, 404 aa, Arabidopsis thaliana
  misc_feature (1)..(404): Ceres Seq. ID no. 13591515
MQQPPPGGILPHHAPPPSAQQQYGYQQPYGIAGAAPPPPQMWNPQAAAPPSVQPTTADEIRTLWIGDLQYWMDENFLYGCFAHTGEMVSAKVIRNKQTGQVEGYGFIEFASHAAAERVLQTFNNAPIPSFPDQLFRLNWASLSSGDKRDDSPDYTIFVGDLAADVTDYILLETFRASYPSVKGAKVVIDRVTGRTKGYGFVRFSDESEQIRAMTEMNGVPCSTRPMRIGPAASKKGVTGQRDSYQSSAAGVTTDNDPNNTTVFVGGLDASVTDDHLKNVFSQYGEIVHVKIPAGKRCGFVQFSEKSCAEEALRMLNGVQLGGTTVRLSWGRSPSNKQSGDPSQFYYGGYGQGQEQYGYTMPQDPNAYYGGYSGGGYSGGYQQTPQAGQQPPQQPPQQQQVGFSY

SEQ ID NO: 31867 - protein, 364 aa, Arabidopsis thaliana
  misc_feature (1)..(364): Ceres Seq. ID no. 13591516
MWNPQAAAPPSVQPTTADEIRTLWIGDLQYWMDENFLYGCFAHTGEMVSAKVIRNKQTGQVEGYGFIEFASHAAAERVLQTFNNAPIPSFPDQLFRLNWASLSSGDKRDDSPDYTIFVGDLAADVTDYILLETFRASYPSVKGAKVVIDRVTGRTKGYGFVRFSDESEQIRAMTEMNGVPCSTRPMRIGPAASKKGVTGQRDSYQSSAAGVTTDNDPNNTTVFVGGLDASVTDDHLKNVFSQYGEIVHVKIPAGKRCGFVQFSEKSCAEEALRMLNGVQLGGTTVRLSWGRSPSNKQSGDPSQFYYGGYGQGQEQYGYTMPQDPNAYYGGYSGGGYSGGYQQTPQAGQQPPQQPPQQQQVGFSY

SEQ ID NO: 31868 - DNA, 2274 bp, Arabidopsis thaliana
  misc_feature (1)..(2274): Ceres Seq. ID no. 13591529
aaaacaagttcattcgatctatagagacgaaacaaaaagagagatcgtacgcaaaagtttccgatatggctcgctcgtttggagctaacagtaccgttgtgttggcgatcatcttcttcggatgtttatttgcgttgtcctctgcaatagaagaggctacgaagttaggatcagtgatagggatagatcttggtactacttactcttgtgttggtgtttacaagaatggtcatgtcgaaattattgccaatgaccaaggaaaccgtattacaccttcatgggttggttttactgactctgaaagactcattggtgaggctgctaagaatcaagcagctgttaatccagagaggactgtcttcgacgttaagagattgatcgggcgaaaatttgaggataaggaggttcaaaaggataggaaacttgtaccttaccagattgtgaacaaggatggtaagccatacattcaagtcaagatcaaggatggtgagactaaggttttcagtcctgaggagattagtgctatgattctgactaagatgaaggagacagctgaagcctaccttggaaagaaaatcaaggacgctgttgtcactgttccagcttacttcaatgatgctcaaaggcaagctactaaggatgctggtgttattgctgggctcaatgttgctagaatcattaatgaacctactgctgctgctattgcctatggtcttgataagaagggtggcgagaagaatatccttgtgtttgatcttggtggtggtacttttgatgtcagtgtcttgaccattgataacggagtgtttgaggttctctccacaaatggtgacactcacttgggaggtgaggactttgaccacagggtgatggagtacttcatcaagttgattaagaagaagcaccagaaggacatcagcaaggacaacaaggctcttggtaagctccgaagggaatgtgagagggcaaagagagctctaagtagtcagcaccaagtccgtgtagagattgagtcactctttgatggtgttgatttttctgagccactcaccagagctcgtttcgaggagcttaacaatgatttgttcaggaagaccatgggacctgtgaagaaggccatggatgatgccggtctacagaagagccagatcgatgagattgtccttgttggtggaagcaccaggatcccaaaggttcagcaactgttgaaggacttctttgaaggtaaagagccaaacaagggtgtgaaccccgacgaggctgttgcctatggtgctgctgttcagggtggtattttgagcggagaaggcggtgatgagaccaaagatatccttcttcttgatgttgcgccactcactttgggtatcgagactgtaggaggagtgatgacaaagttgatcccgagaaacacggttattccaaccaagaaatctcaggttttcacaacgtaccaagaccagcagactaccgtctccattcaggtctttgaaggtgaacgaagtctcaccaaggactgcaggctactcgggaaattcgacctcaatggaatcccaccggccccaagaggaacccctcaaatcgaggtcacattcgaagtggacgccaacggtattcttaatgtgaaagcagaggacaaggcgagtggtaaatcagagaagattactatcacaaacgagaagggtcgtctgagccaagaagagattgaccggatggtgaaggaggcagaggagtttgcagaggaagacaagaaggtaaaggagaagatcgacgccaggaatgccctggagacatacgtgtacaacatgaagaaccaagtgaacgacaaggacaagcttgccgacaaattggaaggagatgaaaaggagaagatcgaagcagcgacgaaagaggctttggagtggctcgacgaaaaccaaaactcagagaaagaagagtacgacgagaagctcaaggaggtagaggcagtgtgtaacccaatcatcacagcagtttaccagagatctggcggagcaccaggtggtgcaggaggagaatcatcgactgaggaggaagatgagtctcacgatgagctctagatgtcttttgttattgttaatttgttaaaccatagagacgagttttgaggatgaaacgtcgttttttttgtatttggtttcctttttatatggatttttaggaaaaggggagagattaagtaacgtcccttctttagtctccctggacgttctctttatgtctctatgcatcaaattacatcgataaagtttttaaaga

SEQ ID NO: 31869 - protein, 690 aa, Arabidopsis thaliana
  misc_feature (1)..(690): Ceres Seq. ID no. 13591530
NKFIRSIETKQKERSYAKVSDMARSFGANSTVVLAIIFFGCLFALSSAIEEATKLGSVIGIDLGTTYSCVGVYKNGHVEIIANDQGNRITPSWVGFTDSERLIGEAAKNQAAVNPERTVFDVKRLIGRKFEDKEVQKDRKLVPYQIVNKDGKPYIQVKIKDGETKVFSPEEISAMILTKMKETAEAYLGKKIKDAVVTVPAYFNDAQRQATKDAGVIAGLNVARIINEPTAAAIAYGLDKKGGEKNILVFDLGGGTFDVSVLTIDNGVFEVLSTNGDTHLGGEDFDHRVMEYFIKLIKKKHQKDISKDNKALGKLRRECERAKRALSSQHQVRVEIESLFDGVDFSEPLTRARFEELNNDLFRKTMGPVKKAMDDAGLQKSQIDEIVLVGGSTRIPKVQQLLKDFFEGKEPNKGVNPDEAVAYGAAVQGGILSGEGGDETKDILLLDVAPLTLGIETVGGVMTKLIPRNTVIPTKKSQVFTTYQDQQTTVSIQVFEGERSLTKDCRLLGKFDLNGIPPAPRGTPQIEVTFEVDANGILNVKAEDKASGKSEKITITNEKGRLSQEEIDRMVKEAEEFAEEDKKVKEKIDARNALETYVYNMKNQVNDKDKLADKLEGDEKEKIEAATKEALEWLDENQNSEKEEYDEKLKEVEAVCNPIITAVYQRSGGAPGGAGGESSTEEEDESHDEL

SEQ ID NO: 31870 - protein, 669 aa, Arabidopsis thaliana
  misc_feature (1)..(669): Ceres Seq. ID no. 13591531
MARSFGANSTVVLAIIFFGCLFALSSAIEEATKLGSVIGIDLGTTYSCVGVYKNGHVEIIANDQGNRITPSWVGFTDSERLIGEAAKNQAAVNPERTVFDVKRLIGRKFEDKEVQKDRKLVPYQIVNKDGKPYIQVKIKDGETKVFSPEEISAMILTKMKETAEAYLGKKIKDAVVTVPAYFNDAQRQATKDAGVIAGLNVARIINEPTAAAIAYGLDKKGGEKNILVFDLGGGTFDVSVLTIDNGVFEVLSTNGDTHLGGEDFDHRVMEYFIKLIKKKHQKDISKDNKALGKLRRECERAKRALSSQHQVRVEIESLFDGVDFSEPLTRARFEELNNDLFRKTMGPVKKAMDDAGLQKSQIDEIVLVGGSTRIPKVQQLLKDFFEGKEPNKGVNPDEAVAYGAAVQGGILSGEGGDETKDILLLDVAPLTLGIETVGGVMTKLIPRNTVIPTKKSQVFTTYQDQQTTVSIQVFEGERSLTKDCRLLGKFDLNGIPPAPRGTPQIEVTFEVDANGILNVKAEDKASGKSEKITITNEKGRLSQEEIDRMVKEAEEFAEEDKKVKEKIDARNALETYVYNMKNQVNDKDKLADKLEGDEKEKIEAATKEALEWLDENQNSEKEEYDEKLKEVEAVCNPIITAVYQRSGGAPGGAGGESSTEEEDESHDEL

SEQ ID NO: 31871 - protein, 516 aa, Arabidopsis thaliana
  misc_feature (1)..(516): Ceres Seq. ID no. 13591532
MILTKMKETAEAYLGKKIKDAVVTVPAYFNDAQRQATKDAGVIAGLNVARIINEPTAAAIAYGLDKKGGEKNILVFDLGGGTFDVSVLTIDNGVFEVLSTNGDTHLGGEDFDHRVMEYFIKLIKKKHQKDISKDNKALGKLRRECERAKRALSSQHQVRVEIESLFDGVDFSEPLTRARFEELNNDLFRKTMGPVKKAMDDAGLQKSQIDEIVLVGGSTRIPKVQQLLKDFFEGKEPNKGVNPDEAVAYGAAVQGGILSGEGGDETKDILLLDVAPLTLGIETVGGVMTKLIPRNTVIPTKKSQVFTTYQDQQTTVSIQVFEGERSLTKDCRLLGKFDLNGIPPAPRGTPQIEVTFEVDANGILNVKAEDKASGKSEKITITNEKGRLSQEEIDRMVKEAEEFAEEDKKVKEKIDARNALETYVYNMKNQVNDKDKLADKLEGDEKEKIEAATKEALEWLDENQNSEKEEYDEKLKEVEAVCNPIITAVYQRSGGAPGGAGGESSTEEEDESHDEL

SEQ ID NO: 31872 - DNA, 1381 bp, Arabidopsis thaliana
  misc_feature (1)..(1381): Ceres Seq. ID no. 13591537
atcggaaaaaattaaaaaccctaatttgagcagatctttccaattgaaagcgaaccgtgaattttgagtctctttaccggcggcgaaaaaatgcttggtggattatacggagatcttcctccaccgaccgatgatgagaaacccagtggaaactcctcttccgtctggtcaagcagtaccaaaatggctccacctacacttcgcaaaccaccagcttttgctcccccgcaaacaatcttaagacctctcaacaaacctaaacctatcgtttcggctccgtacaagcctcctcctccttcgaattcatcgcaatcggtgcttattccggcgaacgaatcagcaccttcgcatcagcctgcattggttggtgtgacttcatcggtgattgaagagtacgatccagcgagacctaacgattacgaggagtataagagggagaagaagaggaaagctacggaagctgagatgaaacgagagatggataagagaaggcaagaggatgaggaaagagataagagagaaagagaagagagggagaaggagagagagagagataacagtgatccgtctcggttgaatatctccggtgaggaagcgtggaagagacgcgctgctatgagtggtggtggaagtggtgggaagggaagatcttcgtctccgccggggaatgttgatgggtttagtattgggaaatcggagacgagtgggttaggagtaggagcaggtggacagatgacagctgctcagaggatgatggcgaagatgggatggaaacaaggacaagggcttgggaaatcagagcaagggattactacgccattgatggctaagaagactgatcgtagagctggtgtcattgtcaatgctagtgagaataaatcttcttcggcggagaagaaggttgttaagagtgttaatatcaatggtgaaccaaccagggttttgcttcttagaaacatggttgggccaggacaagtagatgatgagctagaagatgaggtaggaggcgagtgtggcaaatacggtacagtcactcgtgtactgatattcgagatcactgaaccgaacttccctgtacacgaagcagtaagaatctttgttcagttttcaagacccgaggaaacaactaaagcccttgtagacctcgatgggagatactttggaggaagaaccgtacgtgcaacgttctatgatgaagagaaattcagtaagaacgagttggctccagttccaggtgaaatccctggctattaataactcctaagacaaagaagaaacttcatcttctaggagattcttgttagagaaagaaaccatagatgaggttttaaaaacatttgtaaagtacttagaaatcttgggattatctctttattgttgt

SEQ ID NO: 31873 - protein, 387 aa, Arabidopsis thaliana
  misc_feature (1)..(387): Ceres Seq. ID no. 13591538
MLGGLYGDLPPPTDDEKPSGNSSSVWSSSTKMAPPTLRKPPAFAPPQTILRPLNKPKPIVSAPYKPPPPSNSSQSVLIPANESAPSHQPALVGVTSSVIEEYDPARPNDYEEYKREKKRKATEAEMKREMDKRRQEDEERDKREREEREKERERDNSDPSRLNISGEEAWKRRAAMSGGGSGGKGRSSSPPGNVDGFSIGKSETSGLGVGAGGQMTAAQRMMAKMGWKQGQGLGKSEQGITTPLMAKKTDRRAGVIVNASENKSSSAEKKVVKSVNINGEPTRVLLLRNMVGPGQVDDELEDEVGGECGKYGTVTRVLIFEITEPNFPVHEAVRIFVQFSRPEETTKALVDLDGRYFGGRTVRATFYDEEKFSKNELAPVPGEIPGY

SEQ ID NO: 31874 - protein, 356 aa, Arabidopsis thaliana
  misc_feature (1)..(356): Ceres Seq. ID no. 13591539
MAPPTLRKPPAFAPPQTILRPLNKPKPIVSAPYKPPPPSNSSQSVLIPANESAPSHQPALVGVTSSVIEEYDPARPNDYEEYKREKKRKATEAEMKREMDKRRQEDEERDKREREEREKERERDNSDPSRLNISGEEAWKRRAAMSGGGSGGKGRSSSPPGNVDGFSIGKSETSGLGVGAGGQMTAAQRMMAKMGWKQGQGLGKSEQGITTPLMAKKTDRRAGVIVNASENKSSSAEKKVVKSVNINGEPTRVLLLRNMVGPGQVDDELEDEVGGECGKYGTVTRVLIFEITEPNFPVHEAVRIFVQFSRPEETTKALVDLDGRYFGGRTVRATFYDEEKFSKNELAPVPGEIPGY

SEQ ID NO: 31875 - protein, 262 aa, Arabidopsis thaliana
  misc_feature (1)..(262): Ceres Seq. ID no. 13591540
MKREMDKRRQEDEERDKREREEREKERERDNSDPSRLNISGEEAWKRRAAMSGGGSGGKGRSSSPPGNVDGFSIGKSETSGLGVGAGGQMTAAQRMMAKMGWKQGQGLGKSEQGITTPLMAKKTDRRAGVIVNASENKSSSAEKKVVKSVNINGEPTRVLLLRNMVGPGQVDDELEDEVGGECGKYGTVTRVLIFEITEPNFPVHEAVRIFVQFSRPEETTKALVDLDGRYFGGRTVRATFYDEEKFSKNELAPVPGEIPGY

SEQ ID NO: 31876 - DNA, 2075 bp, Arabidopsis thaliana
  misc_feature (1)..(2075): Ceres Seq. ID no. 13591542
gagcgcacacaaagtttgcttgccttctgggcttcacgattctcacgacatctgtttatcttctccgatttccacgtccatggatctcagtcaatgttccttaatctctcttttcgattagtccaatctccactaatctctgacctcagatcgcttccgacgccgctgaactgtgtccgtcttgatctgtgtttaggagaaagcttctagggtttttgttttggttgctgagtagaatttgttggatctgaaacggaaatcaaaatgggctttttcagtacgatactaggattttgtggatttggagttgggatttcattgggacttgttattggttacgttctcttcgtctacttgctccccaacgacgtcaaggatcctgaaattcgttcaatagctgaccaagatcccaaagctatgctacggatgcttccagagatacctctatgggtcaaaaatccggatttcgatcgtgttgactggataaacagatttctcgagtacatgtggccttatctcgacaaggccatatgtaagactgcaaagaatatagcaaaaccgatcattgaggagcagataccaaagtacaagattgactctgttgaatttgaaacgcttactctaggctctttaccccctacatttcaagggatgaaagtttatctcacggatgagaaagagttgattatggaaccatgcttgaaatgggccgcaaatcccaatatcttggttgccatcaaggcatttgggttgaaggcaacagttcaggtggtcgatctgcaagtttttgctcagcctcgtatcactctcaagccattagttccaagtttcccttgttttgccaatatctatgtgtctcttatggagaagccacatgttgattttggactgaagcttggtggagcagatcttatgtcaatccctggcctctacagatttgttcaggagcaaatcaaggatcaagttgcgaacatgtatctctggcctaagacccttgtagttccaatccttgaccctgcaaaggcgttcagaaggcctgttggaattgtccatgtgaaagttgtgagggctgtggggctgaggaaaaaagatctgatgggcggggcagatccattcgtgaaaatcaagctctctgaagataagattccttctaagaagacaacagttaaacacaagaatttgaatcctgaatggaatgaggagttcaaattctcggtcagagatccccagactcaggttctagagttcagtgtgtatgactgggaacaggttgggaatcccgagaagatgggtatgaatgtattagctctgaaagaaatggtgcctgacgaacataaagcattcaccttggaactgcgtaagactctggacggcggtgaagatgggcagcctcctgacaagtatagggggaagctggaggttgaactcttgtataagccattcacggaggaagaaatgcccaaaggctttgaagaaacgcaagccgtgcagaaagctccagaaggcacaccggctgctggaggaatgcttgtggtaatagtgcattcggctgaggatgttgaaggaaagcaccataccaatccttacgtgcgcatctatttcaaaggagaagagagaaaaacaaagcacgtgaagaagaacagagacccaaggtggaatgaggagttcacctttatgctcgaggagcctccagtccgtgagaagctgcacgttgaagtgctgagcacctcttccaggataggtctattgcatcccaaggaaacactggggtatgtggatattccagtggtggacgtggtgaacaacaaaaggatgaatcagaagtttcaccttattgattctaagaacggaaagatccaaatcgagctcgagtggcgaactgcctcttgatttctgagttgattcgagaacaaacaaagagataattggtttgatgttgttaagaactatgtgttgttgtacaaaatgggctttaactcttaaaaaccaacattcagatttgcagagccttcttttatttggatttgtgtgtcttcgacttctcttttctatgaaattcggtagtgtgagtgacc

SEQ ID NO: 31877 - protein, 541 aa, Arabidopsis thaliana
  misc_feature (1)..(541): Ceres Seq. ID no. 13591543
MGFFSTILGFCGFGVGISLGLVIGYVLFVYLLPNDVKDPEIRSIADQDPKAMLRMLPEIPLWVKNPDFDRVDWINRFLEYMWPYLDKAICKTAKNIAKPIIEEQIPKYKIDSVEFETLTLGSLPPTFQGMKVYLTDEKELIMEPCLKWAANPNILVAIKAFGLKATVQVVDLQVFAQPRITLKPLVPSFPCFANIYVSLMEKPHVDFGLKLGGADLMSIPGLYRFVQEQIKDQVANMYLWPKTLVVPILDPAKAFRRPVGIVHVKVVRAVGLRKKDLMGGADPFVKIKLSEDKIPSKKTTVKHKNLNPEWNEEFKFSVRDPQTQVLEFSVYDWEQVGNPEKMGMNVLALKEMVPDEHKAFTLELRKTLDGGEDGQPPDKYRGKLEVELLYKPFTEEEMPKGFEETQAVQKAPEGTPAAGGMLVVIVHSAEDVEGKHHTNPYVRIYFKGEERKTKHVKKNRDPRWNEEFTFMLEEPPVREKLHVEVLSTSSRIGLLHPKETLGYVDIPVVDVVNNKRMNQKFHLIDSKNGKIQIELEWRTAS

SEQ ID NO: 31878 - protein, 490 aa, Arabidopsis thaliana
  misc_feature (1)..(490): Ceres Seq. ID no. 13591544
MLRMLPEIPLWVKNPDFDRVDWINRFLEYMWPYLDKAICKTAKNIAKPIIEEQIPKYKIDSVEFETLTLGSLPPTFQGMKVYLTDEKELIMEPCLKWAANPNILVAIKAFGLKATVQVVDLQVFAQPRITLKPLVPSFPCFANIYVSLMEKPHVDFGLKLGGADLMSIPGLYRFVQEQIKDQVANMYLWPKTLVVPILDPAKAFRRPVGIVHVKVVRAVGLRKKDLMGGADPFVKIKLSEDKIPSKKTTVKHKNLNPEWNEEFKFSVRDPQTQVLEFSVYDWEQVGNPEKMGMNVLALKEMVPDEHKAFTLELRKTLDGGEDGQPPDKYRGKLEVELLYKPFTEEEMPKGFEETQAVQKAPEGTPAAGGMLVVIVHSAEDVEGKHHTNPYVRIYFKGEERKTKHVKKNRDPRWNEEFTFMLEEPPVREKLHVEVLSTSSRIGLLHPKETLGYVDIPVVDVVNNKRMNQKFHLIDSKNGKIQIELEWRTAS

SEQ ID NO: 31879 - protein, 487 aa, Arabidopsis thaliana
  misc_feature (1)..(487): Ceres Seq. ID no. 13591545
MLPEIPLWVKNPDFDRVDWINRFLEYMWPYLDKAICKTAKNIAKPIIEEQIPKYKIDSVEFETLTLGSLPPTFQGMKVYLTDEKELIMEPCLKWAANPNILVAIKAFGLKATVQVVDLQVFAQPRITLKPLVPSFPCFANIYVSLMEKPHVDFGLKLGGADLMSIPGLYRFVQEQIKDQVANMYLWPKTLVVPILDPAKAFRRPVGIVHVKVVRAVGLRKKDLMGGADPFVKIKLSEDKIPSKKTTVKHKNLNPEWNEEFKFSVRDPQTQVLEFSVYDWEQVGNPEKMGMNVLALKEMVPDEHKAFTLELRKTLDGGEDGQPPDKYRGKLEVELLYKPFTEEEMPKGFEETQAVQKAPEGTPAAGGMLVVIVHSAEDVEGKHHTNPYVRIYFKGEERKTKHVKKNRDPRWNEEFTFMLEEPPVREKLHVEVLSTSSRIGLLHPKETLGYVDIPVVDVVNNKRMNQKFHLIDSKNGKIQIELEWRTAS

SEQ ID NO: 31880 - DNA, 2389 bp, Arabidopsis thaliana
  misc_feature (1)..(2389): Ceres Seq. ID no. 13591580
gagttaaatttcttcgtcttccatacaaagcgactacttcaccatcaccttcgggcactggacctatttaagcatcctaacttcttcttcaaagcttraaaaccagaaaacaaaaggaagctctntgttcaaatcaaaaagagagatcgtacgcaaaagtttccgatatggctcgctcgtttggagctaacagtaccgttgtgttggcgatcatcttcttcggatgtttatttgcgttgtcctctgcaatagaagaggctacgaagttaggatcagtgatagggatagatcttggtactacttactcttgtgttggtgtttacaagaatggtcatgtcgaaattattgccaatgaccaaggaaaccgtattacaccttcatgggttggttttactgactctgaaagactcattggtgaggctgctaagaatcaagcagctgttaatccagagaggactgtcttcgacgttaagagattgatcgggcgaaaatttgaggataaggaggttcaaaaggataggaaacttgtaccttaccagattgtgaacaaggatggtaagccatacattcaagtcaagatcaaggatggtgagactaaggttttcagtcctgaggagattagtgctatgattctgactaagatgaaggagacagctgaagcctaccttggaaagaaaatcaaggacgctgttgtcactgttccagcttacttcaatgatgctcaaaggcaagctactaaggatgctggtgttattgctgggctcaatgttgctagaatcattaatgaacctactgctgctgctattgcctatggtcttgataagaagggtggcgagaagaatatccttgtgtttgatcttggtggtggtacttttgatgtcagtgtcttgaccattgataacggagtgtttgaggttctctccacaaatggtgacactcacttgggaggtgaggactttgaccacagggtgatggagtacttcatcaagttgattaagaagaagcaccagaaggacatcagcaaggacaacaaggctcttggtaagctccgaagggaatgtgagagggcaaagagagctctaagtagtcagcaccaagtccgtgtagagattgagtcactctttgatggtgttgatttttctgagccactcaccagagctcgtttcgaggagcttaacaatgatttgttcaggaagaccatgggacctgtgaagaaggccatggatgatgccggtctacagaagagccagatcgatgagattgtccttgttggtggaagcaccaggatcccaaaggttcagcaactgttgaaggacttctttgaaggtaaagagccaaacaagggtgtgaaccccgacgaggctgttgcctatggtgctgctgttcagggtggtattttgagcggagaaggcggtgatgagaccaaagatatccttcttcttgatgttgcgccactcactttgggtatcgagactgtaggaggagtgatgacaaagttgatcccgagaaacacggttattccaaccaagaaatctcaggttttcacaacgtaccaagaccagcagactaccgtctccattcaggtctttgaaggtgaacgaagtctcaccaaggactgcaggctactcgggaaattcgacctcaatggaatcccaccggccccaagaggaacccctcaaatcgaggtcacattcgaagtggacgccaacggtattcttaatgtgaaagcagaggacaaggcgagtggtaaatcagagaagattactatcacaaacgagaagggtcgtctgagccaagaagagattgaccggatggtgaaggaggcagaggagtttgcagaggaagacaagaaggtaaaggagaagatcgacgccaggaatgccctggagacatacgtgtacaacatgaagaaccaagtgaacgacaaggacaagcttgccgacaaattggaaggagatgaaaaggagaagatcgaagcagcgacgaaagaggctttggagtggctcgacgaaaaccaaaactcagagaaagaagagtacgacgagaagctcaaggaggtagaggcagtgtgtaacccaatcatcacagcagtttaccagagatctggcggagcaccaggtggtgcaggaggagaatcatcgactgaggaggaagatgagtctcacgatgagctctagatgtcttytgttattgttaatttrttaaaccatagagacragttttgaggatgaaacgtcgtttttgttttttgtatttggtttcctttttcwtatggatttttaggaaaaggggagagattaagtarcgtcccttctttagtctccctggacgttctctttatgttcatctgataactttacttcttcataacaaataccttttttctatt

SEQ ID NO: 31881 - protein, 669 aa, Arabidopsis thaliana; identical to SEQ ID NO: 31870
  misc_feature (1)..(669): Ceres Seq. ID no. 15221053

SEQ ID NO: 31882 - protein, 516 aa, Arabidopsis thaliana; identical to SEQ ID NO: 31871
  misc_feature (1)..(516): Ceres Seq. ID no. 15221054

SEQ ID NO: 31883 - protein, 511 aa, Arabidopsis thaliana
  misc_feature (1)..(511): Ceres Seq. ID no. 15221055
MKETAEAYLGKKIKDAVVTVPAYFNDAQRQATKDAGVIAGLNVARIINEPTAAAIAYGLDKKGGEKNILVFDLGGGTFDVSVLTIDNGVFEVLSTNGDTHLGGEDFDHRVMEYFIKLIKKKHQKDISKDNKALGKLRRECERAKRALSSQHQVRVEIESLFDGVDFSEPLTRARFEELNNDLFRKTMGPVKKAMDDAGLQKSQIDEIVLVGGSTRIPKVQQLLKDFFEGKEPNKGVNPDEAVAYGAAVQGGILSGEGGDETKDILLLDVAPLTLGIETVGGVMTKLIPRNTVIPTKKSQVFTTYQDQQTTVSIQVFEGERSLTKDCRLLGKFDLNGIPPAPRGTPQIEVTFEVDANGILNVKAEDKASGKSEKITITNEKGRLSQEEIDRMVKEAEEFAEEDKKVKEKIDARNALETYVYNMKNQVNDKDKLADKLEGDEKEKIEAATKEALEWLDENQNSEKEEYDEKLKEVEAVCNPIITAVYQRSGGAPGGAGGESSTEEEDESHDEL

SEQ ID NO: 31884 - DNA, 2059 bp, Arabidopsis thaliana
  misc_feature (1)..(2059): Ceres Seq. ID no. 13591609
agatcacactcatatcgaatcaaaatctcaaacctttttcttcatttcttcccccctctctctctctcactctgtttctgatgggtctccgattcccacctaaggtgttggaacatatcctctccttcattgattccaacgaggaccggaactctgtttctctggtctgcaagtcatggtttgagacagaacggaagactaggaagcgagtctttgtcggaaactgttacgcggtcagtcctgctgcggttacacgacggttcccggagatgagatctttgactttgaaggggaagccacacttcgctgactataatctcgttcctgatggttggggtggttatgcttggccgtggattgaagctatggcggcgaaaagttcgtctcttgaagagatcagaatgaagaggatggtggtgactgatgagtgcttagagaaaattgctgcttcgtttaaggattttaaagtccttgtgttgacttcttgtgaaggtttctctactgatggtatcgctgctattgcagctacttgcaggaacttgagagtgttggaactacgagagtgtattgttgaagatttaggaggagattggcttagctattttccagagagttcaacttctttggtctctcttgacttctcttgtttagattctgaggttaaaatctcggatttagagcgtcttgtgagcagatctccaaacttgaagtctttgaagttgaatccagctgtgactctagatggactcgttagcttacttcgttgtgctccacaactgactgagctcggcacaggttctttcgcagctcaattgaaacctgaagcgttttcaaagttatcagaagctttttcaaactgtaagcaacttcagagcttatctggtctctgggatgtcctccctgaatatcttccagctctttattctgtctgtcctggtcttacctcgttgaacttgagctacgctactgtccgaatgcctgatcttgttgagcttcttaggcgatgctcgaaactgcagaagctatgggtgatggacttgattgaggacaaaggtcttgaagctgttgcctcatattgcaaggaactgcgagaactgagggtgtttccatctgagccagatcttgatgcaaccaacatacctctgacggaacaaggcctggtctttgtgtctaaaggctgtcgaaagcttgagtctgttctctacttctgtgtccagttcacaaacgcagctttgtttaccatagcaagaaaacgtccgaatctcaagtgcttccgtctctgtgtgatagagccatttgctcctgattacaaaacaaatgagccacttgataaaggattcaaagccatagctgagggatgcagggatcttcgacggctctccgtctctggtcttctctctgacaaggccttcaaatacattgggaaacatgccaagaaggttaggatgctatcaatagcatttgctggggacagtgatttgatgcttcatcacttgttgtcgggctgtgagagtttaaagaagcttgagatacgagactgcccttttggagacactgcactactggagcacgctgccaagctagagaccatgcgatccctttggatgtcatcttgctttgtaagttttggtgcttgcaagcttctaagtcagaaaatgccaaggctcaatgtcgaagtcattgatgaacatcctccagagtcaagacctgagagctctccagttgagaggatatacatatacagaacagtcgcaggaccgagaatggatacgcctgaatttgtgtggacgatacacaagaatcctgagaatggagtttcacatctagccataaagtaaacttgctgcttcagtcatattttcctttccatcttcagtttttgcagacattgttgtgggagagattcaccttccatttgttccctttcatattgtttttactaagatattagaatatcagtgatagaagcatttcatagcttgtactctgttaaacaaacaaaaccttgtgtttggaataaaattatcattttataagatttatagtaaaagaagtttgt

SEQ ID NO: 31885 - protein, 611 aa, Arabidopsis thaliana
  misc_feature (1)..(611): Ceres Seq. ID no. 13591610
ITLISNQNLKPFSSFLPPSLSLTLFLMGLRFPPKVLEHILSFIDSNEDRNSVSLVCKSWFETERKTRKRVFVGNCYAVSPAAVTRRFPEMRSLTLKGKPHFADYNLVPDGWGGYAWPWIEAMAAKSSSLEEIRMKRMVVTDECLEKIAASFKDFKVLVLTSCEGFSTDGIAAIAATCRNLRVLELRECIVEDLGGDWLSYFPESSTSLVSLDFSCLDSEVKISDLERLVSRSPNLKSLKLNPAVTLDGLVSLLRCAPQLTELGTGSFAAQLKPEAFSKLSEAFSNCKQLQSLSGLWDVLPEYLPALYSVCPGLTSLNLSYATVRMPDLVELLRRCSKLQKLWVMDLIEDKGLEAVASYCKELRELRVFPSEPDLDATNIPLTEQGLVFVSKGCRKLESVLYFCVQFTNAALFTIARKRPNLKCFRLCVIEPFAPDYKTNEPLDKGFKAIAEGCRDLRRLSVSGLLSDKAFKYIGKHAKKVRMLSIAFAGDSDLMLHHLLSGCESLKKLEIRDCPFGDTALLEHAAKLETMRSLWMSSCFVSFGACKLLSQKMPRLNVEVIDEHPPESRPESSPVERIYIYRTVAGPRMDTPEFVWTIHKNPENGVSHLAIK

SEQ ID NO: 31886 - protein, 585 aa, Arabidopsis thaliana
  misc_feature (1)..(585): Ceres Seq. ID no. 13591611
MGLRFPPKVLEHILSFIDSNEDRNSVSLVCKSWFETERKTRKRVFVGNCYAVSPAAVTRRFPEMRSLTLKGKPHFADYNLVPDGWGGYAWPWIEAMAAKSSSLEEIRMKRMVVTDECLEKIAASFKDFKVLVLTSCEGFSTDGIAAIAATCRNLRVLELRECIVEDLGGDWLSYFPESSTSLVSLDFSCLDSEVKISDLERLVSRSPNLKSLKLNPAVTLDGLVSLLRCAPQLTELGTGSFAAQLKPEAFSKLSEAFSNCKQLQSLSGLWDVLPEYLPALYSVCPGLTSLNLSYATVRMPDLVELLRRCSKLQKLWVMDLIEDKGLEAVASYCKELRELRVFPSEPDLDATNIPLTEQGLVFVSKGCRKLESVLYFCVQFTNAALFTIARKRPNLKCFRLCVIEPFAPDYKTNEPLDKGFKAIAEGCRDLRRLSVSGLLSDKAFKYIGKHAKKVRMLSIAFAGDSDLMLHHLLSGCESLKKLEIRDCPFGDTALLEHAAKLETMRSLWMSSCFVSFGACKLLSQKMPRLNVEVIDEHPPESRPESSPVERIYIYRTVAGPRMDTPEFVWTIHKNPENGVSHLAIK

SEQ ID NO: 31887 - protein, 522 aa, Arabidopsis thaliana
  misc_feature (1)..(522): Ceres Seq. ID no. 13591612
MRSLTLKGKPHFADYNLVPDGWGGYAWPWIEAMAAKSSSLEEIRMKRMVVTDECLEKIAASFKDFKVLVLTSCEGFSTDGIAAIAATCRNLRVLELRECIVEDLGGDWLSYFPESSTSLVSLDFSCLDSEVKISDLERLVSRSPNLKSLKLNPAVTLDGLVSLLRCAPQLTELGTGSFAAQLKPEAFSKLSEAFSNCKQLQSLSGLWDVLPEYLPALYSVCPGLTSLNLSYATVRMPDLVELLRRCSKLQKLWVMDLIEDKGLEAVASYCKELRELRVFPSEPDLDATNIPLTEQGLVFVSKGCRKLESVLYFCVQFTNAALFTIARKRPNLKCFRLCVIEPFAPDYKTNEPLDKGFKAIAEGCRDLRRLSVSGLLSDKAFKYIGKHAKKVRMLSIAFAGDSDLMLHHLLSGCESLKKLEIRDCPFGDTALLEHAAKLETMRSLWMSSCFVSFGACKLLSQKMPRLNVEVIDEHPPESRPESSPVERIYIYRTVAGPRMDTPEFVWTIHKNPENGVSHLAIK

SEQ ID NO: 31888 - DNA, 841 bp, Arabidopsis thaliana
  misc_feature (1)..(841): Ceres Seq. ID no. 13591613
cgtagacttatctctatataccccctttaatttgtttgctcttagcctttactttatagttttatatcatatcaatcgacatggcgaatgtggatcgtgatcggcgtgtgcatgtagaccgtactgacaaacgtgttcatcagccaaactacgaagatgatgtcggttttggtggctatggcggttatggtgctggttctgattataagagtcgcggcccctccactaaccaaatcttggcacttatagcaggagttcccattggtggcacactgctaaccctagctggactcactctagccggttcggtgatcggcttgctagtctccatacccctcttcctcctcttcagtccggtgatagtcccggcggctctcactattgggcttgctgtgacgggaatcttggcttctggtttgtttgggttgacgggtctgagctcggtctcgtgggtcctcaactacctccgtgggacgagtgatacagtgccagagcaattggactacgctaaacggcgtatggctgatgcggtaggctatgctggtatgaagggaaaagagatgggtcagtatgtgcaagataaggctcatgaggctcgtgagactgagttcatgactgagacccatgagccgggtaaggccaggagaggctcataagctaatataaattgcgggagtcagttggaaacgcgataaatgtagttttacttttatgtcccagtttctttcctcttttaagaatatctttgtctatatatgtgttcgttcgttttgtcttgtccaaataaaaatccttgttagtgaaataagaaatgaaataaatatgttttcttttttgagat

SEQ ID NO: 31889 - protein, 191 aa, Arabidopsis thaliana
  misc_feature (1)..(191): Ceres Seq. ID no. 13591614
MANVDRDRRVHVDRTDKRVHQPNYEDDVGFGGYGGYGAGSDYKSRGPSTNQILALIAGVPIGGTLLTLAGLTLAGSVIGLLVSIPLFLLFSPVIVPAALTIGLAVTGILASGLFGLTGLSSVSWVLNYLRGTSDTVPEQLDYAKRRMADAVGYAGMKGKEMGQYVQDKAHEARETEFMTETHEPGKARRGS

SEQ ID NO: 31890 - DNA, 1166 bp, Arabidopsis thaliana
  misc_feature (1)..(1166): Ceres Seq. ID no. 13591615
ggtggtgaatgagagagtcaactttaatggagaaagtcacaaggagaactatctcctccttcatcttctttatcgtctcttctaccattctttttctcgccggaaaatcctcggccaaaatttctcataacggtgacaataatgtgacggccttgttcctctttggagactctttcttggatgcaggaaacaataattacattaacaccactacacttgaccaagccaattttccaccttatggtcaaacattctttggcctccccaccggaagattctccgacggtcgtctcatctctgatttcattgcggaatatgcgaatttgccgttaattccgccgtttttggaaccgggaaatagtcaaaagaagctttacggcgtcaactttgcgtctgctggtgctggtgctcttgtggaaacgttccaaggttcggttataaatttgagaacacaattggatcactacaagaaagtggagagattatggaggacaaactttggtaaagaagaaagcaagaagagaatctcaagagctgtctatttgataagcattgggagcaatgactactcaagcattttcttgaccaatcaatctcttcccatttcaatgtctcaacatgttgacattgtcattggtaatctgactacattcattcatgaaatatacaagattggaggacgtaaattcgggttcttgaatgtgcctgacttgggttgttttccggctttacgaattctacaaccgaagaatgatgattcttgcttaagagatgcttcaagattagcaagcatgcataacagagctctgacaaatctcttgtttcaaatgcaaagacaagtcaagggattcaaattctccctatttgacatgaacaaaagccttagactcagaatgcaacatccttctaaatttgggtttaaagaaggggaagaagcttgttgtggaactgggaagtggagaggagtattcagctgtggagggaagagaattgtgaaagaatatcaattgtgtgagaatcctaaagattatattttttgggattcacttcatctcacacaaaatacatataaccaattcgcaaacttaatttggaacggtggacacatgtcagattctctagtggttggtccatacaatatcaataatttatttcagattccttga

SEQ ID NO: 31891 - protein, 385 aa, Arabidopsis thaliana
  misc_feature (1)..(385): Ceres Seq. ID no. 13591616
MRESTLMEKVTRRTISSFIFFIVSSTILFLAGKSSAKISHNGDNNVTALFLFGDSFLDAGNNNYINTTTLDQANFPPYGQTFFGLPTGRFSDGRLISDFIAEYANLPLIPPFLEPGNSQKKLYGVNFASAGAGALVETFQGSVINLRTQLDHYKKVERLWRTNFGKEESKKRISRAVYLISIGSNDYSSIFLTNQSLPISMSQHVDIVIGNLTTFIHEIYKIGGRKFGFLNVPDLGCFPALRILQPKNDDSCLRDASRLASMHNRALTNLLFQMQRQVKGFKFSLFDMNKSLRLRMQHPSKFGFKEGEEACCGTGKWRGVFSCGGKRIVKEYQLCENPKDYIFWDSLHLTQNTYNQFANLIWNGGHMSDSLVVGPYNINNLFQIP

SEQ ID NO: 31892 - protein, 379 aa, Arabidopsis thaliana
  misc_feature (1)..(379): Ceres Seq. ID no. 13591617
MEKVTRRTISSFIFFIVSSTILFLAGKSSAKISHNGDNNVTALFLFGDSFLDAGNNNYINTTTLDQANFPPYGQTFFGLPTGRFSDGRLISDFIAEYANLPLIPPFLEPGNSQKKLYGVNFASAGAGALVETFQGSVINLRTQLDHYKKVERLWRTNFGKEESKKRISRAVYLISIGSNDYSSIFLTNQSLPISMSQHVDIVIGNLTTFIHEIYKIGGRKFGFLNVPDLGCFPALRILQPKNDDSCLRDASRLASMHNRALTNLLFQMQRQVKGFKFSLFDMNKSLRLRMQHPSKFGFKEGEEACCGTGKWRGVFSCGGKRIVKEYQLCENPKDYIFWDSLHLTQNTYNQFANLIWNGGHMSDSLVVGPYNINNLFQIP

SEQ ID NO: 31893 - DNA, 2739 bp, Arabidopsis thaliana
  misc_feature (1)..(2739): Ceres Seq. ID no. 13591630
agagatataattagagaaaatctgtgctctttcagatcccattatcacaaatccatctctctctctctctcagagaagaaaccaaagaagaagaaaaagctctcaactttcttcgatttctcagggaactctttcgttaatctcaaactcaatcatgtctaccccagctgaatcttcagactcgaaatcgaagaaagatttcagtactgctattctcgagaggaagaagtctccgaaccgtctcgtcgtcgatgaggctatcaacgatgataactccgtcgtctctcttcaccctgcaaccatggagaagcttcagctcttccgtggtgataccattctcatcaagggtaagaagaggaaggacactgtctgcattgctcttgctgatgagacatgtgaggagccaaagatcagaatgaataaagtagtcagatctaacttgagggttagactgggagatgttatatctgttcaccaatgcccagacgtcaagtacggaaagcgtgttcacatcctgcctgttgatgatactgttgaaggagtgactggaaacctatttgatgcttacctgaaaccttatttccttgaggcataccgtccagtgaggaagggtgatctcttcctagtcagaggaggaatgaggagtgtggagttcaaagttatagagacagatcctgctgagtactgcgtggttgctccagacacagagattttctgtgagggtgagcctgtgaagagagaggatgaagaaaggctagatgatgtaggttatgatgatgttggtggtgtcaggaaacagatggctcagattagggaacttgttgaacttcccttgaggcatccacagctattcaagtcgattggtgttaagccaccgaagggaattcttctttatggaccacctgggtctggaaagactttgatcgctcgtgctgtggctaatgaaacgggtgcctttttcttctgtatcaacggacctgagatcatgtccaaattggctggtgagagtgagagcaacctcaggaaagcattcgaggaggctgagaaaaatgcgccttcaatcatattcattgatgagatcgactctattgcaccgaaaagagagaagactaatggagaggttgagaggaggattgtctctcagctccttacgctaatggatggactgaaatctcgtgctcatgttatcgtcatgggagcaaccaatcgccccaacagtatcgacccagctttgagaaggtttggaagatttgacagggagatcgatattggagttcctgacgaaattggacgtcttgaagttctgaggatccatacaaagaacatgaagctggctgaagatgtggatctcgaaaggatctcaaaggacacacacggttacgtcggtgctgatcttgcagctttgtgcacagaggccgccctgcaatgcatcagggagaagatggatgtgattgatctggaagatgactccatagacgctgaaatcctcaattccatggcagtcactaatgaacatttccacactgctctcgggaacagcaacccatctgcacttcgtgaaactgttgtggaggttcccaacgtctcttggaatgatattggaggtcttgagaatgtcaagagagagctccaggagactgttcaatacccagtcgagcacccagagaagtttgagaaattcgggatgtctccatcaaagggagtccttttctacggtcctcctggatgtgggaaaacccttttggccaaagctattgccaacgagtgccaagctaatttcatcagtgtcaagggtcccgagcttctgacaatgtggtttggagagagtgaagcaaatgttcgtgaaatcttcgacaaggcccgtcaatccgctccatgtgttcttttctttgatgagctcgactccattgcaactcagagaggaggtggaagtggtggcgatggaggtggtgctgcggacagagtcttgaaccagcttttgactgagatggacggaatgaatgccaagaaaaccgtcttcatcatcggagctaccaacagacctgacattatcgattcagctcttctccgtcctggaaggcttgaccagctcatttacattccactaccagatgaggattcccgtctcaatatcttcaaggccgccttgaggaaatctcctattgctaaagatgtagacatcggtgcacttgctaaatacactcagggtttcagtggtgctgatatcactgagatttgccagagagcttgcaagtacgccatcagagaaaacattgagaaggacattgaaaaggagaagaggaggagcgagaacccagaggcaatggaggaagatggagtggatgaagtatcagagatcaaagctgcacactttgaggagtcgatgaagtatgcgcgtaggagtgtgagtgatgcagacatcaggaagtaccaagcctttgctcagacgttgcagcagtctagagggttcggttctgagttcaggttcgagaattctgctggttcaggtgccaccactggagtcgcagatccgtttgccacgtctgcagccgctgctggggacgatgatgatctctacaattagtgataacttctttatcctttttttttttaagttttaaaactcgaattctctacttttggattactggggaaagtgatactgattctttcctcgtgtttttaagttatccgaatctcttgtgtttgggttttaatcaatgttcttaattttcgttt

SEQ ID NO: 31894 - protein, 809 aa, Arabidopsis thaliana
  misc_feature (1)..(809): Ceres Seq. ID no. 13591631
MSTPAESSDSKSKKDFSTAILERKKSPNRLVVDEAINDDNSVVSLHPATMEKLQLFRGDTILIKGKKRKDTVCIALADETCEEPKIRMNKVVRSNLRVRLGDVISVHQCPDVKYGKRVHILPVDDTVEGVTGNLFDAYLKPYFLEAYRPVRKGDLFLVRGGMRSVEFKVIETDPAEYCVVAPDTEIFCEGEPVKREDEERLDDVGYDDVGGVRKQMAQIRELVELPLRHPQLFKSIGVKPPKGILLYGPPGSGKTLIARAVANETGAFFFCINGPEIMSKLAGESESNLRKAFEEAEKNAPSIIFIDEIDSIAPKREKTNGEVERRIVSQLLTLMDGLKSRAHVIVMGATNRPNSIDPALRRFGRFDREIDIGVPDEIGRLEVLRIHTKNMKLAEDVDLERISKDTHGYVGADLAALCTEAALQCIREKMDVIDLEDDSIDAEILNSMAVTNEHFHTALGNSNPSALRETVVEVPNVSWNDIGGLENVKRELQETVQYPVEHPEKFEKFGMSPSKGVLFYGPPGCGKTLLAKAIANECQANFISVKGPELLTMWFGESEANVREIFDKARQSAPCVLFFDELDSIATQRGGGSGGDGGGAADRVLNQLLTEMDGMNAKKTVFIIGATNRPDIIDSALLRPGRLDQLIYIPLPDEDSRLNIFKAALRKSPIAKDVDIGALAKYTQGFSGADITEICQRACKYAIRENIEKDIEKEKRRSENPEAMEEDGVDEVSEIKAAHFEESMKYARRSVSDADIRKYQAFAQTLQQSRGFGSEFRFENSAGSGATTGVADPFATSAAAAGDDDDLYN

SEQ ID NO: 31895 - protein, 760 aa, Arabidopsis thaliana
  misc_feature (1)..(760): Ceres Seq. ID no. 13591632
MEKLQLFRGDTILIKGKKRKDTVCIALADETCEEPKIRMNKVVRSNLRVRLGDVISVHQCPDVKYGKRVHILPVDDTVEGVTGNLFDAYLKPYFLEAYRPVRKGDLFLVRGGMRSVEFKVIETDPAEYCVVAPDTEIFCEGEPVKREDEERLDDVGYDDVGGVRKQMAQIRELVELPLRHPQLFKSIGVKPPKGILLYGPPGSGKTLIARAVANETGAFFFCINGPEIMSKLAGESESNLRKAFEEAEKNAPSIIFIDEIDSIAPKREKTNGEVERRIVSQLLTLMDGLKSRAHVIVMGATNRPNSIDPALRRFGRFDREIDIGVPDEIGRLEVLRIHTKNMKLAEDVDLERISKDTHGYVGADLAALCTEAALQCIREKMDVIDLEDDSIDAEILNSMAVTNEHFHTALGNSNPSALRETVVEVPNVSWNDIGGLENVKRELQETVQYPVEHPEKFEKFGMSPSKGVLFYGPPGCGKTLLAKAIANECQANFISVKGPELLTMWFGESEANVREIFDKARQSAPCVLFFDELDSIATQRGGGSGGDGGGAADRVLNQLLTEMDGMNAKKTVFIIGATNRPDIIDSALLRPGRLDQLIYIPLPDEDSRLNIFKAALRKSPIAKDVDIGALAKYTQGFSGADITEICQRACKYAIRENIEKDIEKEKRRSENPEAMEEDGVDEVSEIKAAHFEESMKYARRSVSDADIRKYQAFAQTLQQSRGFGSEFRFENSAGSGATTGVADPFATSAAAAGDDDDLYN

SEQ ID NO: 31896 - protein, 722 aa, Arabidopsis thaliana
  misc_feature (1)..(722): Ceres Seq. ID no. 13591633
MNKVVRSNLRVRLGDVISVHQCPDVKYGKRVHILPVDDTVEGVTGNLFDAYLKPYFLEAYRPVRKGDLFLVRGGMRSVEFKVIETDPAEYCVVAPDTEIFCEGEPVKREDEERLDDVGYDDVGGVRKQMAQIRELVELPLRHPQLFKSIGVKPPKGILLYGPPGSGKTLIARAVANETGAFFFCINGPEIMSKLAGESESNLRKAFEEAEKNAPSIIFIDEIDSIAPKREKTNGEVERRIVSQLLTLMDGLKSRAHVIVMGATNRPNSIDPALRRFGRFDREIDIGVPDEIGRLEVLRIHTKNMKLAEDVDLERISKDTHGYVGADLAALCTEAALQCIREKMDVIDLEDDSIDAEILNSMAVTNEHFHTALGNSNPSALRETVVEVPNVSWNDIGGLENVKRELQETVQYPVEHPEKFEKFGMSPSKGVLFYGPPGCGKTLLAKAIANECQANFISVKGPELLTMWFGESEANVREIFDKARQSAPCVLFFDELDSIATQRGGGSGGDGGGAADRVLNQLLTEMDGMNAKKTVFIIGATNRPDIIDSALLRPGRLDQLIYIPLPDEDSRLNIFKAALRKSPIAKDVDIGALAKYTQGFSGADITEICQRACKYAIRENIEKDIEKEKRRSENPEAMEEDGVDEVSEIKAAHFEESMKYARRSVSDADIRKYQAFAQTLQQSRGFGSEFRFENSAGSGATTGVADPFATSAAAAGDDDDLYN

SEQ ID NO: 31897 - DNA, 1664 bp, Arabidopsis thaliana
  misc_feature (1)..(1664): Ceres Seq. ID no. 13591642
gatatcatcaccttccccactaatactctatagtttgtttttgttcttcttataatctttatattttcagcaaacgaaagggaagtgtgtcagaaatctcagagggtgagaatcccaatgaggatcttacccgaacctcgaggttcggttccgtgtcttctccttcttgtgtcggttctcttatcagcgactctctcactcgctcgtgtcgtcgaagttgtcggttacgccgagagcaagatcaaaaccccccatgcattttcaggacttcgagtgacgatcgactgtaaggtgaataaaggccattttgttacaaaaggttcgggaaacattgacgacaaaggaaagtttggtcttaatattcctcatgacattgtctccgacaacggagcgttaaaggaggagtgttacgctcagcttcacagcgcggcgggaacaccttgtccggctcacgacggccttgagtccaccaagatcgtgtttttatccaaatccggggataaacacattttgggtctcaaacaaaatctgaaattttcaccggagatttgcgtttccaaattcttctggcctatgcctaagttgcctccttttaagggctttgatcatcctttccctttacctccacctttggaacttccaccgtttctcaagaagccatgtccacctaaatacagtcctcctgtggaggttccacccccggtaccagtttacgagccgccgccaaagaaagagattcccccgccggttccggtttacgatccaccgcctaagaaagaggttccaccacctgtcccagtttacaagccaccaccaaaggtggagcttccaccgcctattcctaagaagccttgtccacctaaaccgccgaagatagagcacccacctccggttccggtttacaagccaccgccaaagatagagaagccacctccggttccggtttacaagcccccgccaaagatagagcacccacctcccgttccggtacacaagctaccgaagaagccatgtccgcctaagaaagttgatccaccgccggtgccagtccacaaaccaccaacgaagaagccttgtccgcctaagaaagttgatccaccgccggttccagtccacaagccgccgccaaagatagtcattccaccgccgaagatagagcacccacctccagttccggtttacaagccgccgccgaagatagagcatccaccaatctacataccaccaattgtgaagaagccgtgtcctccgccggtaccaatatacaaaccaccggttgtgatccccaagaagccatgccctccgccggtaccagtatacaaaccaccggtagtggtgattccaaagaagccatgtccgccacttccacagctcccaccacttccaaagtttccacctcttcctcctaaatacattcaccaccccaagttcgggaaatggcctccgttgcctccacacccttgagaaacattaaatacgtatatatagatatacgtatactcatgtataatcaacgtgtttgcctttttttaatattttatctttgcatatgttttatatcttgtttcttttgttggctttgagttctctttgtgtagactggttgtttatattcccgcaatcttccaacaataatatggtaatgatacgtttctcttttatct

SEQ ID NO: 31898 - protein, 448 aa, Arabidopsis thaliana
  misc_feature (1)..(448): Ceres Seq. ID no. 13591643
MRILPEPRGSVPCLLLLVSVLLSATLSLARVVEVVGYAESKIKTPHAFSGLRVTIDCKVNKGHFVTKGSGNIDDKGKFGLNIPHDIVSDNGALKEECYAQLHSAAGTPCPAHDGLESTKIVFLSKSGDKHILGLKQNLKFSPEICVSKFFWPMPKLPPFKGFDHPFPLPPPLELPPFLKKPCPPKYSPPVEVPPPVPVYEPPPKKEIPPPVPVYDPPPKKEVPPPVPVYKPPPKVELPPPIPKKPCPPKPPKIEHPPPVPVYKPPPKIEKPPPVPVYKPPPKIEHPPPVPVHKLPKKPCPPKKVDPPPVPVHKPPTKKPCPPKKVDPPPVPVHKPPPKIVIPPPKIEHPPPVPVYKPPPKIEHPPIYIPPIVKKPCPPPVPIYKPPVVIPKKPCPPPVPVYKPPVVVIPKKPCPPLPQLPPLPKFPPLPPKYIHHPKFGKWPPLPPHP

SEQ ID NO: 31899 - protein, 296 aa, Arabidopsis thaliana
  misc_feature (1)..(296): Ceres Seq. ID no. 13591644
MPKLPPFKGFDHPFPLPPPLELPPFLKKPCPPKYSPPVEVPPPVPVYEPPPKKEIPPPVPVYDPPPKKEVPPPVPVYKPPPKVELPPPIPKKPCPPKPPKIEHPPPVPVYKPPPKIEKPPPVPVYKPPPKIEHPPPVPVHKLPKKPCPPKKVDPPPVPVHKPPTKKPCPPKKVDPPPVPVHKPPPKIVIPPPKIEHPPPVPVYKPPPKIEHPPIYIPPIVKKPCPPPVPIYKPPVVIPKKPCPPPVPVYKPPVVVIPKKPCPPLPQLPPLPKFPPLPPKYIHHPKFGKWPPLPPHP

SEQ ID NO: 31900 - DNA, 1873 bp, Arabidopsis thaliana
  misc_feature (1)..(1873): Ceres Seq. ID no. 13591649
tctctctctctctctcggttctcttcttcactgagctcaaagcgattacctcccatgggaaaaatctctgaagtgattatttagcactactttttctttgtctccttctgaatccattttttatggatcttggagttcgtgtttctggtcatgaaaccgtttcttctccgggtcaaactgaactcggatctggtttcagtaacaagcaagaaagatccggtttcgatggtgaagattgctggagaagttcaaagctctcacgaacatcaactgatggattctcttcttcccctgcctctgctaaaacgctgtcgtttcatcaaggcatccctttactgagatctaccactattaatgatcctcgtaaaggacaagaacacatgcttagcttctcttctgcttcaggcaaatcagatgtctcaccttatcttcagtactgtagaaactcaggatatggtttaggaggaatgatgaacacaagcaacatgcatggaaacttgttgacaggagtaaaaggacctttttcattgactcagtgggcagagctagagcaacaggcgttgatctataagtatatcacagccaatgtccctgttccatctagtttacttctctctctcaagaaatcttttttcccttatggttccttgcctcctaattcttttggatggggctcttttcatctgggcttttccggtggtaacatggatcccgagccagggagatgtcgccggacagatggaaagaaatggcggtgctcgagggacgctgttcccgatcaaaagtactgtgaacgacatattaacagaggccgccatcgttcaagaaagcctgtggaaggccaaaatggccacaatactaatgctgccgccgctgcttctgctgctgccgcttctaccgctgctgctgtgtccaaagcggcagcggggacttcagctgttgcgatgcgtggatcagataataacaatagccttgccgctgctgttggaacacaacatcataccaataatcaatctacagattctttggctaacagagttcaaaattctcgaggggcttcggtttttcctgccacgatgaacttacagtcgaaggaaactcatccgaaacaaagcaataatccctttgaattcggactcatctcttctgattcgttacttaatccgtcgcataaacaagcctcgtatgcaacctcttccaaaggctttggatcgtatcttgacttcggcaaccaagccaagcacgcggggaatcacaacaatgtcgattcttggcccgaagagctgaaatcggattggactcagctctcaatgtcaatccctatggctccatcttcccctgttcaagataaacttgcactctcacctttaaggttatcgcgtgagtttgaccccgcgatccacatgggattaggcgtcaacaccgagtttcttgaccccgggaaaaagacgaataactggataccaatctcctggggtaataacaactccatgggaggtccactcggcgaggtactaaacagcacgaccaatagtcccaagtttggttcctctccaacaggcgtcttgcaaaagtcgacatttggttctctttctaacagcagctcggcaagcagcaccatcattggcgataacaacaataagaacggtgatggaaaagatccgcttggcccgaccacgctgatgaatacttctgctactgctccttctctgtgaaactgaaaaaaaaaaactaaggacaattgcgaaaacaaaaacactctgtttttctctgtttctggtttttcttacttgatgcattgttgtttctgttgctgttttctttctatataaagcaagaagaaactaaaggagagatgtgtgtttttttcttc

SEQ ID NO: 31901 - protein, 530 aa, Arabidopsis thaliana
  misc_feature (1)..(530): Ceres Seq. ID no. 13591650
MDLGVRVSGHETVSSPGQTELGSGFSNKQERSGFDGEDCWRSSKLSRTSTDGFSSSPASAKTLSFHQGIPLLRSTTINDPRKGQEHMLSFSSASGKSDVSPYLQYCRNSGYGLGGMMNTSNMHGNLLTGVKGPFSLTQWAELEQQALIYKYITANVPVPSSLLLSLKKSFFPYGSLPPNSFGWGSFHLGFSGGNMDPEPGRCRRTDGKKWRCSRDAVPDQKYCERHINRGRHRSRKPVEGQNGHNTNAAAAASAAAASTAAAVSKAAAGTSAVAMRGSDNNNSLAAAVGTQHHTNNQSTDSLANRVQNSRGASVFPATMNLQSKETHPKQSNNPFEFGLISSDSLLNPSHKQASYATSSKGFGSYLDFGNQAKHAGNHNNVDSWPEELKSDWTQLSMSIPMAPSSPVQDKLALSPLRLSREFDPAIHMGLGVNTEFLDPGKKTNNWIPISWGNNNSMGGPLGEVLNSTTNSPKFGSSPTGVLQKSTFGSLSNSSSASSTIIGDNNNKNGDGKDPLGPTTLMNTSATAPSL

SEQ ID NO: 31902 - protein, 444 aa, Arabidopsis thaliana
  misc_feature (1)..(444): Ceres Seq. ID no. 13591651
MLSFSSASGKSDVSPYLQYCRNSGYGLGGMMNTSNMHGNLLTGVKGPFSLTQWAELEQQALIYKYITANVPVPSSLLLSLKKSFFPYGSLPPNSFGWGSFHLGFSGGNMDPEPGRCRRTDGKKWRCSRDAVPDQKYCERHINRGRHRSRKPVEGQNGHNTNAAAAASAAAASTAAAVSKAAAGTSAVAMRGSDNNNSLAAAVGTQHHTNNQSTDSLANRVQNSRGASVFPATMNLQSKETHPKQSNNPFEFGLISSDSLLNPSHKQASYATSSKGFGSYLDFGNQAKHAGNHNNVDSWPEELKSDWTQLSMSIPMAPSSPVQDKLALSPLRLSREFDPAIHMGLGVNTEFLDPGKKTNNWIPISWGNNNSMGGPLGEVLNSTTNSPKFGSSPTGVLQKSTFGSLSNSSSASSTIIGDNNNKNGDGKDPLGPTTLMNTSATAPSL

SEQ ID NO: 31903 - protein, 415 aa, Arabidopsis thaliana
  misc_feature (1)..(415): Ceres Seq. ID no. 13591652
MMNTSNMHGNLLTGVKGPFSLTQWAELEQQALIYKYITANVPVPSSLLLSLKKSFFPYGSLPPNSFGWGSFHLGFSGGNMDPEPGRCRRTDGKKWRCSRDAVPDQKYCERHINRGRHRSRKPVEGQNGHNTNAAAAASAAAASTAAAVSKAAAGTSAVAMRGSDNNNSLAAAVGTQHHTNNQSTDSLANRVQNSRGASVFPATMNLQSKETHPKQSNNPFEFGLISSDSLLNPSHKQASYATSSKGFGSYLDFGNQAKHAGNHNNVDSWPEELKSDWTQLSMSIPMAPSSPVQDKLALSPLRLSREFDPAIHMGLGVNTEFLDPGKKTNNWIPISWGNNNSMGGPLGEVLNSTTNSPKFGSSPTGVLQKSTFGSLSNSSSASSTIIGDNNNKNGDGKDPLGPTTLMNTSATAPSL

SEQ ID NO: 31904 - DNA, 1050 bp, Arabidopsis thaliana
  misc_feature (1)..(1050): Ceres Seq. ID no. 13591665
ggtattcgtcttccgcctcctctcccatcggttttgaacagcttggcagaagaagtgaaacttgagagagtaatggagaacttggaagatctgaaaattctggctgagcagtggtcgcatcaaggaattgaatatcttcagaagataccaccgaatcagctgtatgccgccattggtgttttgttgtttacaaccatcttgctcttcctatccattcgcctggtcagacgtaccaaatccaacactgtactcctttctgggctgaccggaagtggaaagactgtgctcttttaccaactccgagatggatcgtcgcatcagggcactgtaacatcaatggaaccaaatgaaggcacttttgttcttcacagtgaaaatactaagaaaggaaaaatcaagcctgttcatcttgttgatgttcctgggcactctcggcttcgacccaagctagaagaattcttgccccaagcagctgccattgtgttcgtagtggatgccttggagttcctcccaaactgtcgtgcagcttcagagtacctatacgagattctgaccaatgcgaatgttgtcaagaagaagattccagtcctcctttgctgtaacaagaccgataaactcactgcacacaccaaggagtttatccggaagcaaatggagaaagaaattgagaaactgagggcttcaaggagtgcagtctctactgctgatatagcgaatgacttcaccattggaattgagggagaagtgttctccttcacgcattgctccaacaaagtcactgtcgctgaggcatctggacttaccggagaaaccatccagattgaagacttcattcgagaatacatcaagccatgagctccaacatgccttcatagattgaatctaccacaagtttcttatgctttgggctgtgactttgatttgagtttagagatccttttgtatatgagatctttggatgatttagggtgttcaaaactgagtagctgtattttcgagttagataatctgttttaaatcggaatgattttaaggaaatgttaaatgact

SEQ ID NO: 31905 - protein, 284 aa, Arabidopsis thaliana
  misc_feature (1)..(284): Ceres Seq. ID no. 13591666
GIRLPPPLPSVLNSLAEEVKLERVMENLEDLKILAEQWSHQGIEYLQKIPPNQLYAAIGVLLFTTILLFLSIRLVRRTKSNTVLLSGLTGSGKTVLFYQLRDGSSHQGTVTSMEPNEGTFVLHSENTKKGKIKPVHLVDVPGHSRLRPKLEEFLPQAAAIVFVVDALEFLPNCRAASEYLYEILTNANVVKKKIPVLLCCNKTDKLTAHTKEFIRKQMEKEIEKLRASRSAVSTADIANDFTIGIEGEVFSFTHCSNKVTVAEASGLTGETIQIEDFIREYIKP

SEQ ID NO: 31906 - protein, 260 aa, Arabidopsis thaliana
  misc_feature (1)..(260): Ceres Seq. ID no. 13591667
MENLEDLKILAEQWSHQGIEYLQKIPPNQLYAAIGVLLFTTILLFLSIRLVRRTKSNTVLLSGLTGSGKTVLFYQLRDGSSHQGTVTSMEPNEGTFVLHSENTKKGKIKPVHLVDVPGHSRLRPKLEEFLPQAAAIVFVVDALEFLPNCRAASEYLYEILTNANVVKKKIPVLLCCNKTDKLTAHTKEFIRKQMEKEIEKLRASRSAVSTADIANDFTIGIEGEVFSFTHCSNKVTVAEASGLTGETIQIEDFIREYIKP

SEQ ID NO: 31907 - protein, 172 aa, Arabidopsis thaliana
  misc_feature (1)..(172): Ceres Seq. ID no. 13591668
MEPNEGTFVLHSENTKKGKIKPVHLVDVPGHSRLRPKLEEFLPQAAAIVFVVDALEFLPNCRAASEYLYEILTNANVVKKKIPVLLCCNKTDKLTAHTKEFIRKQMEKEIEKLRASRSAVSTADIANDFTIGIEGEVFSFTHCSNKVTVAEASGLTGETIQIEDFIREYIKP

SEQ ID NO: 31908 - DNA, 1431 bp, Arabidopsis thaliana
  misc_feature (1)..(1431): Ceres Seq. ID no. 13591669
aggtacaagagccttacaaaattcttctggttctctgaggatcaaaccaccacaagtcagaacagagtgaggtaatcattaccaacaaaaaatggcggctttatcatcctcctctctgtttttctcttccaagacaacttctccgatcagcaatctcctgatcccgccatctctccaccgcttctctctaccctcttcatcttcctccttttcctctctctcttcttcttcttcttcttcttcttctctcttgacattctctctgaggacttctcgaaggttatctcctcaaaaatttaccgttaaggccagctccgtcggtgagaagaagaatgtacttatagtcaacaccaacagtggcggtcacgccgtgatcgggttttacttcgccaaagagcttctctccgccggccacgccgtcaccatcttgaccgtcggcgatgaatcttccgaaaagatgaagaaacctcctttcaaccgattctccgaaattgttagcggcggaggaaagacggtgtgggggaacccggccaatgttgccaatgtggtcggaggtgaaacatttgacgttgtccttgacaacaatggcaaggatttggatactgttaggccagtggtggattgggctaaaagctccggcgtcaagcaattcttgttcataagtagcgccgggatctacaagtccaccgaacaacctcctcacgttgaaggggacgcagttaaagccgacgctggtcacgtggtggtggagaagtacttagccgaaacattcgggaactgggcctcctttcgaccgcagtacatgatcggctctggcaacaacaaagactgcgaagaatggttcttcgaccggattgtgagggacagagcagtgccaatcccaggatcaggattgcagctaaccaacatatcccacgtgagggacttgtcttccatgcttacttctgccgttgccaacccagaggctgcttccggcaacatcttcaactgcgttagcgacagagccgttactcttgacggtatggccaagctctgtgctgccgctgctggcaaaactgttgagatcgttcattatgaccctaaagccattggggttgacgccaagaaggcttttctattcagaaacatgcatttctacgcagagccaagagccgctaaggacttattagggtgggagagtaaaacgaatctgcctgaagatctcaaggagagattcgaagagtatgtgaagattggcagagacaagaaagagattaagtttgagttagacgataagatactcgaagccctcaaaactccagtggccgcttgatcaaatacgccataaagtttgttcttcatttgtaacttcttatgctacactgtgctctttcatttcccacggctcatatgagatgaacatgatttcagctaaaagatcatttaaatatc

SEQ ID NO: 31909 - protein, 406 aa, Arabidopsis thaliana
  misc_feature (1)..(406): Ceres Seq. ID no. 15221056
MAALSSSSLFFSSKTTSPISNLLIPPSLHRFSLPSSSSSFSSLSSSSSSSSSLLTFSLRTSRRLSPQKFTVKASSVGEKKNVLIVNTNSGGHAVIGFYFAKELLSAGHAVTILTVGDESSEKMKKPPFNRFSEIVSGGGKTVWGNPANVANVVGGETFDVVLDNNGKDLDTVRPVVDWAKSSGVKQFLFISSAGIYKSTEQPPHVEGDAVKADAGHVVVEKYLAETFGNWASFRPQYMIGSGNNKDCEEWFFDRIVRDRAVPIPGSGLQLTNISHVRDLSSMLTSAVANPEAASGNIFNCVSDRAVTLDGMAKLCAAAAGKTVEIVHYDPKAIGVDAKKAFLFRNMHFYAEPRAAKDLLGWESKTNLPEDLKERFEEYVKIGRDKKEIKFELDDKILEALKTPVAA

SEQ ID NO: 31910 - protein, 284 aa, Arabidopsis thaliana
  misc_feature (1)..(284): Ceres Seq. ID no. 15221057
MKKPPFNRFSEIVSGGGKTVWGNPANVANVVGGETFDVVLDNNGKDLDTVRPVVDWAKSSGVKQFLFISSAGIYKSTEQPPHVEGDAVKADAGHVVVEKYLAETFGNWASFRPQYMIGSGNNKDCEEWFFDRIVRDRAVPIPGSGLQLTNISHVRDLSSMLTSAVANPEAASGNIFNCVSDRAVTLDGMAKLCAAAAGKTVEIVHYDPKAIGVDAKKAFLFRNMHFYAEPRAAKDLLGWESKTNLPEDLKERFEEYVKIGRDKKEIKFELDDKILEALKTPVAA

SEQ ID NO: 31911 - DNA, 1122 bp, Arabidopsis thaliana
  misc_feature (1)..(1122): Ceres Seq. ID no. 13591678
aaaaatcctcttaaaatctcataaagcccttcttatcttcttctcttctcctcaacttgaatacacagaaacaaaactgcttttgtctctcaagtcatttgtcttataaaaaggttctgttcttgaacaagggaaagaaacaaaaggctgataactcctgttttgtagattcctctgatattcagattcttacttctcaggaaaaccctaaagaaaatttctgtttttttttgagaaatatgaagatacaatgtgatgtgtgtgagaaagctccggccacgcttatatgttgtgctgatgaagctgctctctgcgctaaatgtgacgttgaggttcatgctgctaataaactcgctagcaaacaccaacgcctttttcttgactctctctcaactaaattccctccctgcgacatctgccttgagaaggcagctttcatattctgtgtagaggatagggctctgctctgcagagattgcgatgaggcgacccatgcgccaaatactcgctctgctaatcaccagaggttcttagccactggaatccgagttgctcttagttccactagttgcaatcaagaagtggaaaagaatcactttgacccatctaatcagcagagtctctctaaaccgccaactcagcaacccgctgctccatctcctttgtgggctaccgatgaattcttcagctactctgatcttgactgcagtaataaggagaaagagcaactcgatctcggggagctggattggcttgcagagatgggtctgtttggtgaccagcctgatcaagaggctctaccggtagccgaagttcccgagctttccttttcacatttggctcatgctcattcctacaacagacctatgaagtccaatgtacccaacaagaagcagaggcttgagtaccggtatgatgatgaagaagagcacttcctagtccccgacctaggctaaactatggatgaatctactaagctttataatatatagcacttgattcgcatagtcttcggctcttcgccttgctttctccatgatctgatatgtgtatcactgtaagtagcaggctaaaacttggaaaaaccttatcattttattagcaagtgaagccttaaattgc

SEQ ID NO: 31912 - protein, 238 aa, Arabidopsis thaliana
  misc_feature (1)..(238): Ceres Seq. ID no. 13591679
MKIQCDVCEKAPATLICCADEAALCAKCDVEVHAANKLASKHQRLFLDSLSTKFPPCDICLEKAAFIFCVEDRALLCRDCDEATHAPNTRSANHQRFLATGIRVALSSTSCNQEVEKNHFDPSNQQSLSKPPTQQPAAPSPLWATDEFFSYSDLDCSNKEKEQLDLGELDWLAEMGLFGDQPDQEALPVAEVPELSFSHLAHAHSYNRPMKSNVPNKKQRLEYRYDDEEEHFLVPDLG

SEQ ID NO: 31913 - DNA, 1223 bp, Arabidopsis thaliana
  misc_feature (1)..(1223): Ceres Seq. ID no. 13591684
gaatctcgaagttggtcgaagcaaagcaaaagcaaaattctcttggccgagagaagaaacattgatcgtcgatcatggttggaccagtaagacctcaaatcgtacttttcggttcttcaattgttcaatatagcttcactgatcgtggttggggtgccactctcgctgacctctactctcgcacggctgatatcattcttcgtggatatgctggttggaattctaggtttgccttgaaggttcttcaccaagtattcccaaaggatgctgtgatacaaccttctttggtgatagtctatttcggtgggaatgattcaactcatcctcatccttcaggtcatggccctcatgttcctttatctgaattcatcgaaaacatgaggaagattggtgaacatcttttgagcctttctgataaaactcgtgtcattttcctcactccgccaccaatgaatgagaaacagatcgagatagtttttggagatgcaataaaaggccggagtaacgagttgtgccgtccatatgcagaagagttgttaaatctatgcagagagatcaatgtgaaaggtatcgatatttggaccgcgatacagcagcaagatgattggttgaacagctgcttcacagatgggatccatttcactgcgaaggcaagtgagattgttgttaaggagatattgaaggtactgagaggagcggattggaaaccaagtctttactggaaatcattaccggttgaatttccatttgattttgatgctccaaactctataagccttcatgacctagagttaaccagaaacaaccattttgagtcaccgcaccttgtaagcctttgtgaacaagagttaaccagaaacgagcagctggagccgccacaccctgtaagcctttgtgaccatgagttaacccgaaacgagcagctggagccgccacaccctgtaagcctttgtgaccatgagttaacccaaaacgagcagctggagccaccacagcctacggcgcgcttgtaaaacaagtcgtagttagagattatgcttctacattgacatcttgatggtgtgtaaccagtttcacctttcatttgcatctggatatttgtattgctaatttaacattttgttagacgttttgttttgtatcattagtttcgctgggtctttggattagaatattttgttctcacttgtgtgcttcagatatacaaaacaaaatgctagctc

SEQ ID NO: 31914 - protein, 312 aa, Arabidopsis thaliana
  misc_feature (1)..(312): Ceres Seq. ID no. 13591685
MVGPVRPQIVLFGSSIVQYSFTDRGWGATLADLYSRTADIILRGYAGWNSRFALKVLHQVFPKDAVIQPSLVIVYFGGNDSTHPHPSGHGPHVPLSEFIENMRKIGEHLLSLSDKTRVIFLTPPPMNEKQIEIVFGDAIKGRSNELCRPYAEELLNLCREINVKGIDIWTAIQQQDDWLNSCFTDGIHFTAKASEIVVKEILKVLRGADWKPSLYWKSLPVEFPFDFDAPNSISLHDLELTRNNHFESPHLVSLCEQELTRNEQLEPPHPVSLCDHELTRNEQLEPPHPVSLCDHELTQNEQLEPPQPTARL

SEQ ID NO: 31915 - protein, 211 aa, Arabidopsis thaliana
  misc_feature (1)..(211): Ceres Seq. ID no. 13591686
MRKIGEHLLSLSDKTRVIFLTPPPMNEKQIEIVFGDAIKGRSNELCRPYAEELLNLCREINVKGIDIWTAIQQQDDWLNSCFTDGIHFTAKASEIVVKEILKVLRGADWKPSLYWKSLPVEFPFDFDAPNSISLHDLELTRNNHFESPHLVSLCEQELTRNEQLEPPHPVSLCDHELTRNEQLEPPHPVSLCDHELTQNEQLEPPQPTARL

SEQ ID NO: 31916 - protein, 187 aa, Arabidopsis thaliana
  misc_feature (1)..(187): Ceres Seq. ID no. 13591687
MNEKQIEIVFGDAIKGRSNELCRPYAEELLNLCREINVKGIDIWTAIQQQDDWLNSCFTDGIHFTAKASEIVVKEILKVLRGADWKPSLYWKSLPVEFPFDFDAPNSISLHDLELTRNNHFESPHLVSLCEQELTRNEQLEPPHPVSLCDHELTRNEQLEPPHPVSLCDHELTQNEQLEPPQPTARL

SEQ ID NO: 31917 - DNA, 1966 bp, Arabidopsis thaliana
  misc_feature (1)..(1966): Ceres Seq. ID no. 13591692
agggctcgaaatctctctcaaaaccctctcaaaaattccaaaacataatctcatttctcaagtttaacattttcgagcccctttagaacagtggagaaagatccacacagataaaaaaacgggtgagttttatatcaaatagacgaaaatgcccctgtcggcgacggcggatacaagcaagacggtgaagctggagaggtacaatagctacctccggaagattcacagcaccaaagttctcaacgcttcttctaaagttcttttccgagcaacgcttctcgtagctcttgtcctcgtcctcatcttcgccatcaactaccctccactctccgatagccgcgccgccgcagcacaccacctccaccgtcgtagcttcttatccaccggactcttctcctcctcctcttcttcctcctctatcggtggagccgcgtgggaaaagcgcgttagacaatcctcaacagccaaacgaccacacggtctctccgtcctagtcaccggagctgccggattcgtcggatcccactgctcacttgcgctgcgaaaacgtggcgatggagtcttaggattcgacaacttcaacgattactatgacccatcactcaaaagagcaagacaagagctcttggagaaacaacaagtgttcatcgtcgaaggtgatctcaacgatggaccactcttacgtaaactcttcgacgttgtccctttcactcacatccttcacttagccgctcaagccggagtacgttacgctatgaaaaaccctcaatcttacatcgcctccaacatcgccggattcgttaaccttcttgaagtggctaaagcagctaatccacaacctgcgattgtttgggcttcctctagctctgtttacggtctcaacactgagaatccattctctgaagaacaccgaacagaccaaccagcgagtctttacgcagcaaccaagaaagctggtgaagagatcgcacatacttacaaccacatctacggtctctccttaaccggactccggttctttacggtttacggtccatggggaagaccagacatggcttacttcttcttcactaaagacatcctccacggtaaatcaatcgacatttacagaactcaggacaatcaagaagtggcgcgtgacttcacctacatcgatgacatcgttaaaggttgtgtcggtgcgttagacacggctgagaaaagcaccggaagcggcggaaagaagagaggacaagctcagctacgtgtttacaatctaggaaacacgtccccggttccggttgggagattggtctcgatcttggaaggattgttagggacaaaagctaagaagcatcttatcaaaatgccaagaaacggtgacgtgccttacacgcatgctaatgtgagtttagcgtataaagatttcgggtacaaaccgacgacggatctcgcggcggggctgaggaagttcgtcaagtggtacgttggttattatgggattcagccgagggtaaaaaaggaaacttctcacgccgaagattccgcttaataattttctctctaccaccatctctctcatcatcacatgcttgtttatttttcttacaaaaaaaaaaaaaatcatttacagggacagatttctgtatttttctttatttaaaaattgctccccaaaaaaaaaaaatcataaatgtttttgtggtggtcctttttttagggggatcaaagtgtgggaattaaattgttacagctgtatgttataatagaaagatatatagaaatgaggagaggaaaaaaaagaagaaaggggtagaagaattgaaaatatatgtgggattgttatgtaataaatgaaataggttatgatcttgctggaaagtgtttagagcagatcttagccgttggatttttataatcaaggaatgaaacctgtgatccattattataccaactgtaacataaattttattctctctttttatct

SEQ ID NO: 31918 - protein, 460 aa, Arabidopsis thaliana
  misc_feature (1)..(460): Ceres Seq. ID no. 13591693
MPLSATADTSKTVKLERYNSYLRKIHSTKVLNASSKVLFRATLLVALVLVLIFAINYPPLSDSRAAAAHHLHRRSFLSTGLFSSSSSSSSIGGAAWEKRVRQSSTAKRPHGLSVLVTGAAGFVGSHCSLALRKRGDGVLGFDNFNDYYDPSLKRARQELLEKQQVFIVEGDLNDGPLLRKLFDVVPFTHILHLAAQAGVRYAMKNPQSYIASNIAGFVNLLEVAKAANPQPAIVWASSSSVYGLNTENPFSEEHRTDQPASLYAATKKAGEEIAHTYNHIYGLSLTGLRFFTVYGPWGRPDMAYFFFTKDILHGKSIDIYRTQDNQEVARDFTYIDDIVKGCVGALDTAEKSTGSGGKKRGQAQLRVYNLGNTSPVPVGRLVSILEGLLGTKAKKHLIKMPRNGDVPYTHANVSLAYKDFGYKPTTDLAAGLRKFVKWYVGYYGIQPRVKKETSHAEDSA

SEQ ID NO: 31919 - protein, 258 aa, Arabidopsis thaliana
  misc_feature (1)..(258): Ceres Seq. ID no. 13591694
MKNPQSYIASNIAGFVNLLEVAKAANPQPAIVWASSSSVYGLNTENPFSEEHRTDQPASLYAATKKAGEEIAHTYNHIYGLSLTGLRFFTVYGPWGRPDMAYFFFTKDILHGKSIDIYRTQDNQEVARDFTYIDDIVKGCVGALDTAEKSTGSGGKKRGQAQLRVYNLGNTSPVPVGRLVSILEGLLGTKAKKHLIKMPRNGDVPYTHANVSLAYKDFGYKPTTDLAAGLRKFVKWYVGYYGIQPRVKKETSHAEDSA

SEQ ID NO: 31920 - DNA, 1869 bp, Arabidopsis thaliana
  misc_feature (1)..(1869): Ceres Seq. ID no. 13591695
tctttcatcgtcctcaccggaacgcgcctactctctttccacatcgtacgtttcctctctctaaattcttcaactttaaaggtgataaaaattgaatctttcccacaacccacaagaaaattcgaatcctttctctctttctatctcttagtcacgctttcgatcagcaatctcctcgaattctggttggttccgtctctgttttctgtacacaaagccctgctgctgttgatacacgtgagccgccattaatgcccctttgttttcttcttccagctgatttaggaagttggtgatcaaattacatctagtgtttgtttccgccagctgaagtgaatcaaaatgtttagttttggccgagcaagaagccaagggaggcaaaacagatctatgtctcttggaggactggattatgcagaccccaagaagaaaaacaattacttgggaaagattcttttgacagcttctcttacagccttgtgcattttcatgctcaagcaatctccaacattcaatactcctagcgtgttttctcgacatgagccaggggttacacatgttttggtcactggtggtgctgggtatattggttcacatgcagctctaaggcttctaaaggaatcatatcgagtaaccattgtggacaatctatcacggggcaatctcgctgcagtcaggattttgcaagaactatttccggaacctggaaggcttcaatttatttatgctgatcttggagatgccaaagctgtcaacaagatattcacagagaatgcctttgacgctgtgatgcatttcgctgctgttgcatatgttggggaaagcacacaattccctcttaagtattatcacaatattacatcgaacactttggtagtattagagacaatggctgctcatggagtaaagactttgatatattcaagcacttgtgcaacgtatggggagcctgatattatgccaattacagaggaaactcctcaggtgccaatcaacccatatggtaaggccaagaagatggcagaagatatcattttggatttctcgaaaaactcagatatggcagttatgatcctaagatatttcaatgtgattgggtccgatccagagggcagattgggtgaagccccaagacctgagctgcgagagcatggacgcatctccggtgcttgttttgatgcagcacgtggcatcatgcctggcctacagatcaaaggaacagactacaaaaccgctgatggaacttgcgtacgggattacattgatgtcactgatttggttgatgctcatgttaaagctcttcaaaaggcaaaaccacgcaaagttggaatctacaatgttggcaccgggaaaggtagctcggtgaaagagtttgttgaggcgtgcaagaaagcaactggtgttgagatcaagatcgactatttgcctagacgtgcaggtgattacgctgaggtttacagtgatccaagcaagattaggaaggaacttaactggacagctaagcacactaatctcaaagagagtcttgagactgcatggagatggcagaagctgcaccgtaatggctatggcttaacaacctcatcggtctcggtttactgactttgttcattcctttggtgatggacggagattttgattccagatggtattgaggagagaagcgtaggagatgatgatggtttatatataaatataacacaagatatattatccatattatgaaaaaatgatatcacatgacgagatttttgattgatattcattttgtaatggctttaggttcttttaggaagcagccattcattagtatatgtacctctcacaatatttattgattagtcttaataatatatagcattcctggct

SEQ ID NO: 31921 - protein, 419 aa, Arabidopsis thaliana
  misc_feature (1)..(419): Ceres Seq. ID no. 13591696
MFSFGRARSQGRQNRSMSLGGLDYADPKKKNNYLGKILLTASLTALCIFMLKQSPTFNTPSVFSRHEPGVTHVLVTGGAGYIGSHAALRLLKESYRVTIVDNLSRGNLAAVRILQELFPEPGRLQFIYADLGDAKAVNKIFTENAFDAVMHFAAVAYVGESTQFPLKYYHNITSNTLVVLETMAAHGVKTLIYSSTCATYGEPDIMPITEETPQVPINPYGKAKKMAEDIILDFSKNSDMAVMILRYFNVIGSDPEGRLGEAPRPELREHGRISGACFDAARGIMPGLQIKGTDYKTADGTCVRDYIDVTDLVDAHVKALQKAKPRKVGIYNVGTGKGSSVKEFVEACKKATGVEIKIDYLPRRAGDYAEVYSDPSKIRKELNWTAKHTNLKESLETAWRWQKLHRNGYGLTTSSVSVY

SEQ ID NO: 31922 - protein, 403 aa, Arabidopsis thaliana
  misc_feature (1)..(403): Ceres Seq. ID no. 13591697
MSLGGLDYADPKKKNNYLGKILLTASLTALCIFMLKQSPTFNTPSVFSRHEPGVTHVLVTGGAGYIGSHAALRLLKESYRVTIVDNLSRGNLAAVRILQELFPEPGRLQFIYADLGDAKAVNKIFTENAFDAVMHFAAVAYVGESTQFPLKYYHNITSNTLVVLETMAAHGVKTLIYSSTCATYGEPDIMPITEETPQVPINPYGKAKKMAEDIILDFSKNSDMAVMILRYFNVIGSDPEGRLGEAPRPELREHGRISGACFDAARGIMPGLQIKGTDYKTADGTCVRDYIDVTDLVDAHVKALQKAKPRKVGIYNVGTGKGSSVKEFVEACKKATGVEIKIDYLPRRAGDYAEVYSDPSKIRKELNWTAKHTNLKESLETAWRWQKLHRNGYGLTTSSVSVY

SEQ ID NO: 31923 - protein, 370 aa, Arabidopsis thaliana
  misc_feature (1)..(370): Ceres Seq. ID no. 13591698
MLKQSPTFNTPSVFSRHEPGVTHVLVTGGAGYIGSHAALRLLKESYRVTIVDNLSRGNLAAVRILQELFPEPGRLQFIYADLGDAKAVNKIFTENAFDAVMHFAAVAYVGESTQFPLKYYHNITSNTLVVLETMAAHGVKTLIYSSTCATYGEPDIMPITEETPQVPINPYGKAKKMAEDIILDFSKNSDMAVMILRYFNVIGSDPEGRLGEAPRPELREHGRISGACFDAARGIMPGLQIKGTDYKTADGTCVRDYIDVTDLVDAHVKALQKAKPRKVGIYNVGTGKGSSVKEFVEACKKATGVEIKIDYLPRRAGDYAEVYSDPSKIRKELNWTAKHTNLKESLETAWRWQKLHRNGYGLTTSSVSVY

SEQ ID NO: 31924 - DNA, 1289 bp, Arabidopsis thaliana
  misc_feature (1)..(1289): Ceres Seq. ID no. 13591715
ggtactgctgcacaagtgtagaggcagtggcacaacatctttaagaaagagagagagaaagagtcatttattcatttcctcgcttaaaaatcttgagcacccagacagaattcttctttcttctttctggggttgagaaaaatgagtgaaagagatgatggattggggctaagtttgagcttgagtttaggttttaatcaaaaggacccgtcctcgaggttaaatccaatgcctctggcttcttatgcatcttcatcacacatgcagcatatgcagcagagcaattataaccatcctcaaaagattcagaacacttggattaacatgtttcagtcatcagagagaaactcggacatgagatcgtttctccggggaatagacgtaaacagagctccatcgacggtggtggttgacgtggaggatgaaggcgccggagtttcgtctccgaacagcaccgtctcaagcgtgatgagcgggaagaagagcgagcgagagctaatggctgcggcaggtgcagttggaggaggtagagtagaagataatgagattgagagagcttcttgctcgctcggcggtggtagcgacgatgaagacggtagcgggaacggagatgacagttcgaggaagaaactccgattgtctaaagaacaagctttggttcttgaagaaacttttaaagaacatagtacactcaatccgaagcaaaagatggctttggctaagcagttgaatctgaggacgagacaagttgaagtgtggttccaaaaccgaaggcaaaggacgaagctgaagcaaacggaagtagactgtgaatatcttaagagatgttgcgagaatctaacggatgagaatcggagattgcaaaaggaagtgagtgagcttagggctttaaagctttctccacacttatacatgcacatgaaacctcccactactctcacaatgtgtccttcttgcgagcgagtcgctgttacgtcatctccgtcatcggtggctcctcctgtgatgaattcatcgtctccgatgggtccgatgagtccgtgggctgccatgcctctacggcaacgacctgctgctggttctcattagagtttaattagtctaaagataataggtttggtgatttgtttttattatattgttgaacggacttggaagttcttttcaagagttggtcccatgctcttctttcctttgttttattcagtttctatttatagctgaattcaggataatggaaaatctactaatattattgtccaattattagtttggggccctgacgtagc

SEQ ID NO: 31925 - protein, 315 aa, Arabidopsis thaliana
  misc_feature (1)..(315): Ceres Seq. ID no. 13591716
MSERDDGLGLSLSLSLGFNQKDPSSRLNPMPLASYASSSHMQHMQQSNYNHPQKIQNTWINMFQSSERNSDMRSFLRGIDVNRAPSTVVVDVEDEGAGVSSPNSTVSSVMSGKKSERELMAAAGAVGGGRVEDNEIERASCSLGGGSDDEDGSGNGDDSSRKKLRLSKEQALVLEETFKEHSTLNPKQKMALAKQLNLRTRQVEVWFQNRRQRTKLKQTEVDCEYLKRCCENLTDENRRLQKEVSELRALKLSPHLYMHMKPPTTLTMCPSCERVAVTSSPSSVAPPVMNSSSPMGPMSPWAAMPLRQRPAAGSH

SEQ ID NO: 31926 - protein, 286 aa, Arabidopsis thaliana
  misc_feature (1)..(286): Ceres Seq. ID no. 13591717
MPLASYASSSHMQHMQQSNYNHPQKIQNTWINMFQSSERNSDMRSFLRGIDVNRAPSTVVVDVEDEGAGVSSPNSTVSSVMSGKKSERELMAAAGAVGGGRVEDNEIERASCSLGGGSDDEDGSGNGDDSSRKKLRLSKEQALVLEETFKEHSTLNPKQKMALAKQLNLRTRQVEVWFQNRRQRTKLKQTEVDCEYLKRCCENLTDENRRLQKEVSELRALKLSPHLYMHMKPPTTLTMCPSCERVAVTSSPSSVAPPVMNSSSPMGPMSPWAAMPLRQRPAAGSH

SEQ ID NO: 31927 - protein, 275 aa, Arabidopsis thaliana
  misc_feature (1)..(275): Ceres Seq. ID no. 13591718
MQHMQQSNYNHPQKIQNTWINMFQSSERNSDMRSFLRGIDVNRAPSTVVVDVEDEGAGVSSPNSTVSSVMSGKKSERELMAAAGAVGGGRVEDNEIERASCSLGGGSDDEDGSGNGDDSSRKKLRLSKEQALVLEETFKEHSTLNPKQKMALAKQLNLRTRQVEVWFQNRRQRTKLKQTEVDCEYLKRCCENLTDENRRLQKEVSELRALKLSPHLYMHMKPPTTLTMCPSCERVAVTSSPSSVAPPVMNSSSPMGPMSPWAAMPLRQRPAAGSH

SEQ ID NO: 31928 - DNA, 1746 bp, Arabidopsis thaliana
  misc_feature (1)..(1746): Ceres Seq. ID no. 13591719
ggaagaagaagattgattataaaggtgttagctttttcaatacttcacaccaaataaagcctttctcgttagataagtaacaagcatttactcaaaagcttcttcctttctcactctctctctctctctgtctcttcttgtttgctttagacttaagatgggtgcggcgcattttagtaaggagagggtcttcagagggtttctggtttggttctgcttttggggactgatgtctctaacatgcgctgggagactcagtgtttcaaggcagaattttgaagtgcacaaacacttgaatcgattgaataaaccagccgttaagagcattcagagtccagatggtgacataatagactgtgttcacatatcgaagcaaccagcttttgatcaccctttcctcaaagatcacaagattcagatgggacctagttacactccagaatcgctgtttggtgagagcaaagtgtctgagaaaccaaaagagagtgtcaatcctattacacagttatggcaccagaacggagtttgttctgaagggacaataccagtgaggaggacaaagaaagaggatgtcttgagggcgagttctgttaaacggtatggtaagaagaagcacctttctgttcctctgcctcgatctgctgatcctgatctcattaaccaaagtggtcatcagcacgcgatagcttatgtggaaggaggcaagttttacggggcaaaggcgacaataaatgtatgggaacccaaagtgcaaagctctaatgagtttagcttgtctcagttatggattcttggaggttcttttggtcaagatctcaacagcattgaagctggttggcaggttagtccagatttatatggcgataacaacacaaggcttttcacatactggacgagcgatgcttatcaagctacgggctgctacaatctcctttgttcgggtttcatacaaatcaacagtcaaatagcaatgggagcaagtatctctccggtatctggcttccataacccgcaatacgatataagtattaccatttggaaggatccaaaagaagggcactggtggatgcagtttggagacgggtatgtgttgggatactggccaagctttctattctcttacttagcagatagtgcatcaatagtagagtggggtggagaagtagtgaacatggaagaagatggtcaccacacaaccacgcaaatgggaagcggtcaatttccggatgaagggttcacgaaagcgagttacttcaggaacattcaagtcgttgatagctctaataatctgaaagaaccaaaagggctcaacactttcactgagaaatcgaattgctatgatgttgaggttggtaagaatgatgattggggacattatttttactatggaggtcctggaagaaaccctaattgtcagtagaagttaaagaaagaagatgattgaagttgtagaggaacacttgtgctggattttttcttattatgtgaagtgtgaaaatatcgtttttgttgatttttccttacacttactctgtttttttattttacctggacggctggacactgttttgtttttttttggggtttttaggttttgattaggtttagttgaaggttttttaaatgttacttgggttgaaaggtttgtctttagtttgtaagtgtggaagagagaagttgatagtctcttttcttgtaggagtaacctttaagataagaagattaaagatctttggattgtcttag

SEQ ID NO: 31929 - protein, 420 aa, Arabidopsis thaliana
  misc_feature (1)..(420): Ceres Seq. ID no. 13591720
MGAAHFSKERVFRGFLVWFCFWGLMSLTCAGRLSVSRQNFEVHKHLNRLNKPAVKSIQSPDGDIIDCVHISKQPAFDHPFLKDHKIQMGPSYTPESLFGESKVSEKPKESVNPITQLWHQNGVCSEGTIPVRRTKKEDVLRASSVKRYGKKKHLSVPLPRSADPDLINQSGHQHAIAYVEGGKFYGAKATINVWEPKVQSSNEFSLSQLWILGGSFGQDLNSIEAGWQVSPDLYGDNNTRLFTYWTSDAYQATGCYNLLCSGFIQINSQIAMGASISPVSGFHNPQYDISITIWKDPKEGHWWMQFGDGYVLGYWPSFLFSYLADSASIVEWGGEVVNMEEDGHHTTTQMGSGQFPDEGFTKASYFRNIQVVDSSNNLKEPKGLNTFTEKSNCYDVEVGKNDDWGHYFYYGGPGRNPNCQ

SEQ ID NO: 31930 - protein, 396 aa, Arabidopsis thaliana
  misc_feature (1)..(396): Ceres Seq. ID no. 13591721
MSLTCAGRLSVSRQNFEVHKHLNRLNKPAVKSIQSPDGDIIDCVHISKQPAFDHPFLKDHKIQMGPSYTPESLFGESKVSEKPKESVNPITQLWHQNGVCSEGTIPVRRTKKEDVLRASSVKRYGKKKHLSVPLPRSADPDLINQSGHQHAIAYVEGGKFYGAKATINVWEPKVQSSNEFSLSQLWILGGSFGQDLNSIEAGWQVSPDLYGDNNTRLFTYWTSDAYQATGCYNLLCSGFIQINSQIAMGASISPVSGFHNPQYDISITIWKDPKEGHWWMQFGDGYVLGYWPSFLFSYLADSASIVEWGGEVVNMEEDGHHTTTQMGSGQFPDEGFTKASYFRNIQVVDSSNNLKEPKGLNTFTEKSNCYDVEVGKNDDWGHYFYYGGPGRNPNCQ

SEQ ID NO: 31931 - protein, 333 aa, Arabidopsis thaliana
  misc_feature (1)..(333): Ceres Seq. ID no. 13591722
MGPSYTPESLFGESKVSEKPKESVNPITQLWHQNGVCSEGTIPVRRTKKEDVLRASSVKRYGKKKHLSVPLPRSADPDLINQSGHQHAIAYVEGGKFYGAKATINVWEPKVQSSNEFSLSQLWILGGSFGQDLNSIEAGWQVSPDLYGDNNTRLFTYWTSDAYQATGCYNLLCSGFIQINSQIAMGASISPVSGFHNPQYDISITIWKDPKEGHWWMQFGDGYVLGYWPSFLFSYLADSASIVEWGGEVVNMEEDGHHTTTQMGSGQFPDEGFTKASYFRNIQVVDSSNNLKEPKGLNTFTEKSNCYDVEVGKNDDWGHYFYYGGPGRNPNCQ

SEQ ID NO: 31932 - DNA, 1288 bp, Arabidopsis thaliana
  misc_feature (1)..(1288): Ceres Seq. ID no. 13591723
gacagagggtattattgtcagattctccataagcctcttctctctctctcagagtgtggnggtttcatactatttatgtaaaaggaagcaacgggtgagaagaattaaaaagccgcaattttgggatcataagagttctcttcttcatctgtgattcattccgttgttacccgccaggcaccagccaccgtactttttctctctccggcaaaatccgagtctaaaaatgacgagtaaaagcaaaatcctgttcatcggaggaacgggttatatcgggaaatatatagtggaagcgagcgcaagatctggccacccaaccttagttctcgttcgaaattcgacgctcacaagcccttcacgatcctccaccatcgagaatttcaagaacctcggcgttcagtttctcctcggagaccttgacgaccatacgagtctcgtgaattcgataaagcaagcggatgtggtcatctctactgttgggcactccctcttgggacatcaatacaagatcatctccgccattaaagaagccggtaatgttaagagattctttccctccgagtttggaaatgacgtagaccgtgttttcactgtcgaaccggccaagtcagcctatgctacaaaggccaaaatccggcgaacaattgaggccgaaggaatcccatacacttatgtctcatgcaacttcttcgctggctacttcctcccaactctagctcagcctggtgctacttctgctccacgggataaggtcattgttttaggtgatgggaaccccaaagctgtgttcaacaaggaagaagacatcggaacttacacaatcaatgccgtagatgatccaagaactttgaacaagatcttatatattaggccaccaatgaacacttactcattcaatgatcttgtctcgctttgggagaacaagattggcaaaacacttgaaagaatctacgttccagaagaacaactcctcaaacagatcatagaatcatcacccccactcaacgtgatgctatccctttgtcactgcgttttcgtgaaaggaggacacacaagctttgaaatcgaaccttctttcggggtagaagcttctgagctttaccctgatgtcaaatacactactgttgatgaaatcctcaaccaatatgtctaaagctgagtgcttaacgagaatgactctccacaatttgtattttgggttttaaataagtggctattaacctgtctgtttctccggctaatcaaaccgaagtggtggtttattttgaatgtaaggctttagatccgg

SEQ ID NO: 31933 - protein, 308 aa, Arabidopsis thaliana
  misc_feature (1)..(308): Ceres Seq. ID no. 13591724
MTSKSKILFIGGTGYIGKYIVEASARSGHPTLVLVRNSTLTSPSRSSTIENFKNLGVQFLLGDLDDHTSLVNSIKQADVVISTVGHSLLGHQYKIISAIKEAGNVKRFFPSEFGNDVDRVFTVEPAKSAYATKAKIRRTIEAEGIPYTYVSCNFFAGYFLPTLAQPGATSAPRDKVIVLGDGNPKAVFNKEEDIGTYTINAVDDPRTLNKILYIRPPMNTYSFNDLVSLWENKIGKTLERIYVPEEQLLKQIIESSPPLNVMLSLCHCVFVKGGHTSFEIEPSFGVEASELYPDVKYTTVDEILNQYV

SEQ ID NO: 31934 - DNA, 1654 bp, Arabidopsis thaliana
  misc_feature (1)..(1654): Ceres Seq. ID no. 13591733
ggaacaacaaacaaaaagcgtatatttttctctctatcaagattcaagccgtgagctagaaggctaaaaccctcttcttatagatttcaaagcaaccattttcgaactctgtttgattccactgtcgatttaatcatcttacctaatggccggaagggctgcgacgtcgtcggcgaaatgggcgagagagtttttgttcagaagggtttcgtctaatcctcttggagctacccgtaactgttcttcggttcctggagcttcttctgcaccgaaagtccctcatttttccaagagaggaaggatattgacaggagctaccattggtctggccatagctggaggagcttatgttagtactgcagatgaagcaaccttctgtgggtggctattcaacgcaacaaaggttgtgaatcctttctttgctcttctggatgctgagtttgcgcataagctggctgtttcagctgcagctcgcgggtgggtacctagagaaaagaggcctgatccagcaatcttgggacttgaagtttggggaaggaaattctcaaacccaattgggcttgctgctggatttgacaaaaacgctgaggctactgagggactgctagggatgggatttggctttgttgaggtaggctctgtaactcctgttccacaagaaggcaatccgaaaccacgtatcttcagactaagccaagaaggagctattatcaataggtgtggatttaatagcgaagggattgttgtcgttgcaaagcggttgggtgctcaacatggtaaaagaatgttggctgaaacatcagctacttcgtcatctccaagtgatgatgtaaaaccagggggaaaatctggacctggtattcttggggtcaaccttggaaagaacaagacgagtgaggatgctgctgctgactatgtccaaggagttcataacttatcccagtatgctgattacttggtgatcaatgtttcatcacccaatactgcaggactgcgcatgcttcaaggaaggaaacagttgaaggaccttgtaaagaaggttcaagctgctcgggatgagatgcaatggggtgatgaaggtcctcctcctcttcttgtgaagattgctcctgatctgtccagaggagagcttgaagatattgcagcggtggctcttgctctgcacttggatgggctgatcatatcaaatacaacagtctcaaggcctgatgctgtaagcaacaaccccgtggcaacagaaacaggtggtttgagcgggaaaccgctctttgctctctccaccaacatgttgagagatatgtacactttgacacgaggaaagattccattgataggctgtggcggggttagtagtggtgaggatgcttacaagaaaataagagctggagctactcttgttcagctgtacacgggatttgcctatggaggacctgccctcatcccacaaataaaggaggaactggtgaaatgcttagaaagggatggcttcaagtcgatccatgaagcaattggtgctgatcacagatgataaaactcaaagagcaatacgctgcggaaagatcccttttcttaaaacaacaaaacaagttgtatttaaagttcattgattcagttgtctctttctacccccaacaataacatcatcgtttttgcc

SEQ ID NO: 31935 - protein, 460 aa, Arabidopsis thaliana
  misc_feature (1)..(460): Ceres Seq. ID no. 13591734
MAGRAATSSAKWAREFLFRRVSSNPLGATRNCSSVPGASSAPKVPHFSKRGRILTGATIGLAIAGGAYVSTADEATFCGWLFNATKVVNPFFALLDAEFAHKLAVSAAARGWVPREKRPDPAILGLEVWGRKFSNPIGLAAGFDKNAEATEGLLGMGFGFVEVGSVTPVPQEGNPKPRIFRLSQEGAIINRCGFNSEGIVVVAKRLGAQHGKRMLAETSATSSSPSDDVKPGGKSGPGILGVNLGKNKTSEDAAADYVQGVHNLSQYADYLVINVSSPNTAGLRMLQGRKQLKDLVKKVQAARDEMQWGDEGPPPLLVKIAPDLSRGELEDIAAVALALHLDGLIISNTTVSRPDAVSNNPVATETGGLSGKPLFALSTNMLRDMYTLTRGKIPLIGCGGVSSGEDAYKKIRAGATLVQLYTGFAYGGPALIPQIKEELVKCLERDGFKSIHEAIGADHR

SEQ ID NO: 31936 - protein, 305 aa, Arabidopsis thaliana
  misc_feature (1)..(305): Ceres Seq. ID no. 13591735
MGFGFVEVGSVTPVPQEGNPKPRIFRLSQEGAIINRCGFNSEGIVVVAKRLGAQHGKRMLAETSATSSSPSDDVKPGGKSGPGILGVNLGKNKTSEDAAADYVQGVHNLSQYADYLVINVSSPNTAGLRMLQGRKQLKDLVKKVQAARDEMQWGDEGPPPLLVKIAPDLSRGELEDIAAVALALHLDGLIISNTTVSRPDAVSNNPVATETGGLSGKPLFALSTNMLRDMYTLTRGKIPLIGCGGVSSGEDAYKKIRAGATLVQLYTGFAYGGPALIPQIKEELVKCLERDGFKSIHEAIGADHR

SEQ ID NO: 31937 - protein, 247 aa, Arabidopsis thaliana
  misc_feature (1)..(247): Ceres Seq. ID no. 13591736
MLAETSATSSSPSDDVKPGGKSGPGILGVNLGKNKTSEDAAADYVQGVHNLSQYADYLVINVSSPNTAGLRMLQGRKQLKDLVKKVQAARDEMQWGDEGPPPLLVKIAPDLSRGELEDIAAVALALHLDGLIISNTTVSRPDAVSNNPVATETGGLSGKPLFALSTNMLRDMYTLTRGKIPLIGCGGVSSGEDAYKKIRAGATLVQLYTGFAYGGPALIPQIKEELVKCLERDGFKSIHEAIGADHR

SEQ ID NO: 31938 - DNA, 2028 bp, Arabidopsis thaliana
  misc_feature (1)..(2028): Ceres Seq. ID no. 13591753
ggaaaaaaaggaaatctaaagagacaaataaaaaaggaaatctgaagagacaaataaaaaaggaaaccctaaacccccaaatccatgagtacaacacttcttcttcttctctctaagtccagttaaaaatcatctctttgcaatgttgactctttaatcttcgatttataagctctcgaaggaatctattaccttcaatctctctcgttgttagctctttgaattgtagaagagaatgggttgcttacttggttgcttcggtcgtcggaagaatcgtcgccgtcagagacgcagagaatcttttcagccacgtttaaacagaatctctgaggaagctgcaaaggatgttcttttgaatcttagggttcctactgttgaagaagtcccaaagtatgcaaaagattcaactgttatggaagtccctaaaatctcggaggtgtctccaaaggataatcatgtgaacgttgttgagaaagtccctacagtttctgtaactccgatcactgatatctgtgacaaggttgaggagaaacagagtccgagtccaagtccaaatcgtaagagagtaacttttgacaccaatgttaaaacatatgaacacattgcagtagatgaatctgttgagctctttgaagagaagaaagaagaggtgaagtcgaggcaggctcgatgttcgtctgaagggagcgatgttacttctaactcgtcagggtcttatccttctaaccatagatatcagaattgcagagagagtgatgatgaagaggaggatgtaacggattgtgacgatagcgatcttgaggatactgatgatgatgattgtgggctgctagatgatgactattataatgatgacaattatgaggacaagctgcacaactgggataaagtagtttatacggaggagattgcggataatgttatggatatagagagggttgaagaaaagggtagtgtgagtgttagagacagaagtggatatgtcaatgcagtactgaacccgattgagaatctttcccaatggaaagctgtgaaagccaaaggaagaacaacaactcaaacacagcctcggaaggagaatgtgataattgcttccttcagcttggagtctcaggttgatgatttatcatcaacattcagcttgaaccggaaatcaagagatgaaactgagaaacagagaactcaagaaatagctgttgatgctagtctttcaacttggttatccacatcacaaaccacgaccagcggttgtagcagtgttgaaaccacaatgtccgagaagaagaaatactcgaaactggttcaatgccatgatgaaagacctatattgggcgcgttaactgcagaggagataaagcagttctcagctacgaattcgccaaggaaatcgccaagtagaagccctgaatcaccgataattggaacagttggtggttactggaacagtcactcaatggcaacgaacaagtacagtcgaagttcttagaactccaattccacaacagagaaagaattccacacatgtttggttactacattgcctttgtgaaattatttttatcactctgtttgtttgtgtgtgtgtggttgataacaaaatcgttgtgttttgtgtgtgatttgatttagtaatattcattctatttgtttgtattttacagaaatttgtctactttatttcacaagtgaatcaaagttttgtattttttttcctcaaaaaaaaaaaaaaaaaaaaaatggaaagctgtgaaagccaaaggaagaacaacaactcaaacacagcctcggaaggagaatgtgataaatgcttccttcagcttggagtctcaggttgataatttatcatcaacattcagcttgaaccggaaatcaagagatgaaactgagaaacagagaactcaagaaatagctgttgatgctagtctttcaacttggttatccacatcacaaaccacgaccagcggttgtagcagtgttgaaaccacaatgtccgagaagaaaaatactcgaaactggttcaatgccatg

SEQ ID NO: 31939 - protein, 416 aa, Arabidopsis thaliana
  misc_feature (1)..(416): Ceres Seq. ID no. 13591754
MGCLLGCFGRRKNRRRQRRRESFQPRLNRISEEAAKDVLLNLRVPTVEEVPKYAKDSTVMEVPKISEVSPKDNHVNVVEKVPTVSVTPITDICDKVEEKQSPSPSPNRKRVTFDTNVKTYEHIAVDESVELFEEKKEEVKSRQARCSSEGSDVTSNSSGSYPSNHRYQNCRESDDEEEDVTDCDDSDLEDTDDDDCGLLDDDYYNDDNYEDKLHNWDKVVYTEEIADNVMDIERVEEKGSVSVRDRSGYVNAVLNPIENLSQWKAVKAKGRTTTQTQPRKENVIIASFSLESQVDDLSSTFSLNRKSRDETEKQRTQEIAVDASLSTWLSTSQTTTSGCSSVETTMSEKKKYSKLVQCHDERPILGALTAEEIKQFSATNSPRKSPSRSPESPIIGTVGGYWNSHSMATNKYSRSS

SEQ ID NO: 31940 - protein, 357 aa, Arabidopsis thaliana
  misc_feature (1)..(357): Ceres Seq. ID no. 13591755
MEVPKISEVSPKDNHVNVVEKVPTVSVTPITDICDKVEEKQSPSPSPNRKRVTFDTNVKTYEHIAVDESVELFEEKKEEVKSRQARCSSEGSDVTSNSSGSYPSNHRYQNCRESDDEEEDVTDCDDSDLEDTDDDDCGLLDDDYYNDDNYEDKLHNWDKVVYTEEIADNVMDIERVEEKGSVSVRDRSGYVNAVLNPIENLSQWKAVKAKGRTTTQTQPRKENVIIASFSLESQVDDLSSTFSLNRKSRDETEKQRTQEIAVDASLSTWLSTSQTTTSGCSSVETTMSEKKKYSKLVQCHDERPILGALTAEEIKQFSATNSPRKSPSRSPESPIIGTVGGYWNSHSMATNKYSRSS

SEQ ID NO: 31941 - DNA, 1972 bp, Arabidopsis thaliana
  misc_feature (1)..(1972): Ceres Seq. ID no. 13591760
attaattctgtagtctcgagattcgctttttctcctgcttacttctttttatcatcttctcttttcggtttgatttggaaaaactttctgcaaaaaaaagagagattcttaaactttttatctcaagatcctttcaaaaaatctgaaaagagaagatttttaataaaaaagaatggttgaaactggtcaccatcatcaacatccaccggcaccggctgcagccggtcatccgccggttccatccatggcgatggcgcgtaacatgggaaccacttggcctccggcggagcaacttcatcatcttcaatattgcatccactctaacccttcttggcatgagacggttgtactggctttccagcattacatcgttatgctcgggactactgttttgattgccaacacactagtgtcaccaatgggtggagatcctggtgataaagcgcgggttatccagactatattgtttatgtcgggcataaacacgttgctataaacgcttatcgggacaaggcttcccacggttatgggagtatcgttcgcgtatgttcttcccgtattgtctataatcagagattacaacaatggtcaattcgattccgagaaacagagattccgacatactatgagaacggtacaaggatcattaatcatttcttcattcgtcaacatcataatcggatatggtcaggcatgggggaacttaataagaatctttagtcccatcattgttgtgcccgttgtttctgttgtgagccttggcctattccttagaggcttcccactgcttgcaaactgtgtggaaatcggtctaccaatgctgattctgttgatcatcacacagcaatatcttaaacatgcattctcaaggatttctatgattcttgaaagatatgctttacttgtttgcctggctatcatatgggcttttgctgctatccttactgtttctggtgcttataataatgtttctaccgcaacaaaacaaagttgtcgaacggatcgtgcctttcttatgtcatcagctccctggattagaatcccatatccattccagtgggggactccgatattcaaagcgagtcatgtttttggaatgtttggtgctgcaattgtcgcatctgcagagtctaccggagtatttttcgctgcatctagactagcaggagcaacagcgcctccagcacatgtcgtctctcgtagtatcggtctacagggtattggtgtgctccttgaaggaatatttggttccattactggcaataccgcgtccgtggaaaatgtcggtctccttggcctcacacgaatagggagtagacgagtggtgcaggtttcaacgtttttcatgatatttttctccatatttggaaaatttggcgcgttctttgcgtctattccgcttccaatctttgcaggcatatactgtatactacttggaatcgttgttgctgttggaatatcgtttatacagtttaccgacactaattcgatgagaaacatgtacgtcattggtgtctctctcttcttaagtctttccatcgctcagtactttcttgccaacacttcaagagcaggatatggaccagttaggacagcaggaggatggttcaacgatatacttaatacgatatttgcttcggctccgttggtggcgaccattcttgcgaccatactagataacacgttggaagcaagacatgcaagtgacgacgcaagaggaatcccgtggtggaagcccttccagcacaggaacggagacggcaggaacgatgagttctatagtatgccccttagaatcaacgagttaatgccgacacggttcctttgaagactgcctctgaacgtttcttctgtatttggaaatgtaagatatgattatgtgcataccttgtagcttcattggggaaaaattgagtccagtggatacaaatgaacataggcctttgatggaaaaagctatttttttgcaaac

SEQ ID NO: 31942 - protein, 433 aa, Arabidopsis thaliana
  misc_feature (1)..(433): Ceres Seq. ID no. 13591761
MGVSFAYVLPVLSIIRDYNNGQFDSEKQRFRHTMRTVQGSLIISSFVNIIIGYGQAWGNLIRIFSPIIVVPVVSVVSLGLFLRGFPLLANCVEIGLPMLILLIITQQYLKHAFSRISMILERYALLVCLAIIWAFAAILTVSGAYNNVSTATKQSCRTDRAFLMSSAPWIRIPYPFQWGTPIFKASHVFGMFGAAIVASAESTGVFFAASRLAGATAPPAHVVSRSIGLQGIGVLLEGIFGSITGNTASVENVGLLGLTRIGSRRVVQVSTFFMIFFSIFGKFGAFFASIPLPIFAGIYCILLGIVVAVGISFIQFTDTNSMRNMYVIGVSLFLSLSIAQYFLANTSRAGYGPVRTAGGWFNDILNTIFASAPLVATILATILDNTLEARHASDDARGIPWWKPFQHRNGDGRNDEFYSMPLRINELMPTRFL

SEQ ID NO: 31943 - protein, 400 aa, Arabidopsis thaliana
  misc_feature (1)..(400): Ceres Seq. ID no. 13591762
MRTVQGSLIISSFVNIIIGYGQAWGNLIRIFSPIIVVPVVSVVSLGLFLRGFPLLANCVEIGLPMLILLIITQQYLKHAFSRISMILERYALLVCLAIIWAFAAILTVSGAYNNVSTATKQSCRTDRAFLMSSAPWIRIPYPFQWGTPIFKASHVFGMFGAAIVASAESTGVFFAASRLAGATAPPAHVVSRSIGLQGIGVLLEGIFGSITGNTASVENVGLLGLTRIGSRRVVQVSTFFMIFFSIFGKFGAFFASIPLPIFAGIYCILLGIVVAVGISFIQFTDTNSMRNMYVIGVSLFLSLSIAQYFLANTSRAGYGPVRTAGGWFNDILNTIFASAPLVATILATILDNTLEARHASDDARGIPWWKPFQHRNGDGRNDEFYSMPLRINELMPTRFL

SEQ ID NO: 31944 - protein, 336 aa, Arabidopsis thaliana
  misc_feature (1)..(336): Ceres Seq. ID no. 13591763
MLILLIITQQYLKHAFSRISMILERYALLVCLAIIWAFAAILTVSGAYNNVSTATKQSCRTDRAFLMSSAPWIRIPYPFQWGTPIFKASHVFGMFGAAIVASAESTGVFFAASRLAGATAPPAHVVSRSIGLQGIGVLLEGIFGSITGNTASVENVGLLGLTRIGSRRVVQVSTFFMIFFSIFGKFGAFFASIPLPIFAGIYCILLGIVVAVGISFIQFTDTNSMRNMYVIGVSLFLSLSIAQYFLANTSRAGYGPVRTAGGWFNDILNTIFASAPLVATILATILDNTLEARHASDDARGIPWWKPFQHRNGDGRNDEFYSMPLRINELMPTRFL

SEQ ID NO: 31945 - DNA, 1111 bp, Arabidopsis thaliana
  misc_feature (1)..(1111): Ceres Seq. ID no. 13591787
gccattgcttaatcctctcctctccttcacgttgagatatttttgagttttctgtgctgaattttggggaatcgaagaaattgaatttcaaaaatcaatggcggaagaaattgaaaaatctgtgccgacagaggaatctctgatggagaagatctccgagaagattcaccatcacgattcgtcgtcatcgtctgaatccgagtacgagaaacctgattctccttcggctgtgaaagcgaagatctatcgtatgtttggcagagagaagcctgttcacaaggttctcggtggtggaaagcctgctgatgtgttcttgtggagggataaaaaactatcaggtgctgttcttggtgtcgcgactgctatttgggttctgttcgagctggttgagtatcatttgttgagtcttttgtgtcacatttcgatactcgctcttggaggcctctttttgtggtccaatgctcacacacttatcaacaagacttcaccacaaattccagaaatccatgttcccgaggaggctttccttgtggttgcttcttctctgagaaacgaactaaaccaagcttttgttatcctacgaagcattgctttaggaagggacctaaaaaaattcctgatggttgttgtcggtctatggatcatctcggtggtgggcaattggttcaatttcctgactttggtgtacatttgcttcgtgatattgcacacagtcccaatgttgtatgagaaacacgaggacaaggttgatccattggcagagaaagcaatgaaggagttgcagaaacagtatgtggttttcgatgaaaaggttctctctaagattcccattgcttctctcaaggcaaaggcaaaattgggttaaaaagagagacagacgtctatggttttctttttgcatttttgatcatgtgaaattggtggtcacttgcagggttttgccgctaatggcccaactgtcctttttatgattttatcacgttttgagtacacttgttttttcttttcaaataccattttttccagctttttatggagaattcttgagctcatgaaacgtgagacattgtttcgttttgaatattccacaaatatagaagatataaatcac

SEQ ID NO: 31946 - protein, 255 aa, Arabidopsis thaliana
  misc_feature (1)..(255): Ceres Seq. ID no. 13591788
MAEEIEKSVPTEESLMEKISEKIHHHDSSSSSESEYEKPDSPSAVKAKIYRMFGREKPVHKVLGGGKPADVFLWRDKKLSGAVLGVATAIWVLFELVEYHLLSLLCHISILALGGLFLWSNAHTLINKTSPQIPEIHVPEEAFLVVASSLRNELNQAFVILRSIALGRDLKKFLMVVVGLWIISVVGNWFNFLTLVYICFVILHTVPMLYEKHEDKVDPLAEKAMKELQKQYVVFDEKVLSKIPIASLKAKAKLG

SEQ ID NO: 31947 - protein, 240 aa, Arabidopsis thaliana
  misc_feature (1)..(240): Ceres Seq. ID no. 13591789
MEKISEKIHHHDSSSSSESEYEKPDSPSAVKAKIYRMFGREKPVHKVLGGGKPADVFLWRDKKLSGAVLGVATAIWVLFELVEYHLLSLLCHISILALGGLFLWSNAHTLINKTSPQIPEIHVPEEAFLVVASSLRNELNQAFVILRSIALGRDLKKFLMVVVGLWIISVVGNWFNFLTLVYICFVILHTVPMLYEKHEDKVDPLAEKAMKELQKQYVVFDEKVLSKIPIASLKAKAKLG

SEQ ID NO: 31948 - protein, 204 aa, Arabidopsis thaliana
  misc_feature (1)..(204): Ceres Seq. ID no. 13591790
MFGREKPVHKVLGGGKPADVFLWRDKKLSGAVLGVATAIWVLFELVEYHLLSLLCHISILALGGLFLWSNAHTLINKTSPQIPEIHVPEEAFLVVASSLRNELNQAFVILRSIALGRDLKKFLMVVVGLWIISVVGNWFNFLTLVYICFVILHTVPMLYEKHEDKVDPLAEKAMKELQKQYVVFDEKVLSKIPIASLKAKAKLG

SEQ ID NO: 31949 - DNA, 1807 bp, Arabidopsis thaliana
  misc_feature (1)..(1807): Ceres Seq. ID no. 13591791
ggcagattcctttctcctcgagaacaaaaaaaacttctttttttttctctttctctcttggcttctctttagaaagtgactcaccagaaaaaaaaaagggtttttgcttttcgggtttagctaagaaaaatctttcaatcttccttaaatctttcaaaaccccaaaatgggacctcgttgctctaagctctctctctgttggtggccgacccatctcaaatcaactcacaacgaagcttctgatctagataacggaacggacgatttgccgtcgtttacggagtttagtttcgaccaactacgagctgctacttgtggattctctacagacagtattgtctccgaacatggtgttaaagctcctaatgttgtgtataaaggcagacttgaagatgaccgatggatcgctgttaaacgattcaatagatccgcttggcctgatactcgtcaatttcttgaagaagcaaaagctgtggggcagttgaggaatgagaggttggcgaatttgattggattctgttgtgaaggagacgagagattgctcgttgctgagtttatgccttttgaaactctctcgaagcatctctttcactgggatagtcagccaatgaagtggtctatgaggttgagagtggctttgtatcttgcacaagcacttgagtattgtagcagcaaaggtcgcgccttgtaccacgatcttaatgcttacaggatcttgtttgaccaggatggtaacccgagattatcttgctttggtcttatgaagaatagtagggatgggaagagttacagtacaaatttggctttcacacctcctgaatacctaagaacagggagagtgattccggagagtgtggtctacagcttcggaacgctgttgctagatcttctcagcggcaaacacataccaccaagccatgcgcttgatctgattcgtgggaagaatttcctgatgctgatggactcgtgtctagatggccatttctcaaacgatgatggaaccgatttggttcgtttagcttcccgttgtttgcagtatgaagctcgtgaaaggccaaatgtgaaatctctcgtgtcctcactcgctcctcttcagaaagaaactgatattccgtctcatgttttaatggggattccacatggagctgcttctccaaaggaaacaacttcgcttacccctcttggtgacgcttgttcacgacatgatctcacagcaatacatgaaattctcgaaaaggttggatacaaagatgacgagggtgtagcaaatgagctctcgttccaagtgtggaccgaccagattcaggagactctaaactccaagaaacaaggagatgctgcgttcaaaggcaaagactttgtcactgctgttgaatgttacacgcagttcatcgaagatggcacaatggtatcgccaacagtttttgcaaggaggtgtttgtgttatctgatgagcaatatgcctcaagaggctcttggtgatgcaatgcaggcgcaagtagtgtctcctgaatggccaacggctttctatcttcaggccgctgctctcttcagccttggaatggataaagacgcctgtgaaaccctaaaagatggaacttccttggaagccaagaaacataacaacagaaactgaaaacttcaagtgtataggtttcttctctcttccgccttcttcgttttgtgattggattctgagaaagcctcattgtctctgtcttctttaagcattatcttaaatttgtggtttccaatttgaagagatgattcaaatcacatttgaatcaagaaaagaaggatctttctc

SEQ ID NO: 31950 - protein, 489 aa, Arabidopsis thaliana
  misc_feature (1)..(489): Ceres Seq. ID no. 13591792
MGPRCSKLSLCWWPTHLKSTHNEASDLDNGTDDLPSFTEFSFDQLRAATCGFSTDSIVSEHGVKAPNVVYKGRLEDDRWIAVKRFNRSAWPDTRQFLEEAKAVGQLRNERLANLIGFCCEGDERLLVAEFMPFETLSKHLFHWDSQPMKWSMRLRVALYLAQALEYCSSKGRALYHDLNAYRILFDQDGNPRLSCFGLMKNSRDGKSYSTNLAFTPPEYLRTGRVIPESVVYSFGTLLLDLLSGKHIPPSHALDLIRGKNFLMLMDSCLDGHFSNDDGTDLVRLASRCLQYEARERPNVKSLVSSLAPLQKETDIPSHVLMGIPHGAASPKETTSLTPLGDACSRHDLTAIHEILEKVGYKDDEGVANELSFQVWTDQIQETLNSKKQGDAAFKGKDFVTAVECYTQFIEDGTMVSPTVFARRCLCYLMSNMPQEALGDAMQAQVVSPEWPTAFYLQAAALFSLGMDKDACETLKDGTSLEAKKHNNRN

SEQ ID NO: 31951 - protein, 359 aa, Arabidopsis thaliana
  misc_feature (1)..(359): Ceres Seq. ID no. 13591793
MPFETLSKHLFHWDSQPMKWSMRLRVALYLAQALEYCSSKGRALYHDLNAYRILFDQDGNPRLSCFGLMKNSRDGKSYSTNLAFTPPEYLRTGRVIPESVVYSFGTLLLDLLSGKHIPPSHALDLIRGKNFLMLMDSCLDGHFSNDDGTDLVRLASRCLQYEARERPNVKSLVSSLAPLQKETDIPSHVLMGIPHGAASPKETTSLTPLGDACSRHDLTAIHEILEKVGYKDDEGVANELSFQVWTDQIQETLNSKKQGDAAFKGKDFVTAVECYTQFIEDGTMVSPTVFARRCLCYLMSNMPQEALGDAMQAQVVSPEWPTAFYLQAAALFSLGMDKDACETLKDGTSLEAKKHNNRN

SEQ ID NO: 31952 - protein, 342 aa, Arabidopsis thaliana
  misc_feature (1)..(342): Ceres Seq. ID no. 13591794
MKWSMRLRVALYLAQALEYCSSKGRALYHDLNAYRILFDQDGNPRLSCFGLMKNSRDGKSYSTNLAFTPPEYLRTGRVIPESVVYSFGTLLLDLLSGKHIPPSHALDLIRGKNFLMLMDSCLDGHFSNDDGTDLVRLASRCLQYEARERPNVKSLVSSLAPLQKETDIPSHVLMGIPHGAASPKETTSLTPLGDACSRHDLTAIHEILEKVGYKDDEGVANELSFQVWTDQIQETLNSKKQGDAAFKGKDFVTAVECYTQFIEDGTMVSPTVFARRCLCYLMSNMPQEALGDAMQAQVVSPEWPTAFYLQAAALFSLGMDKDACETLKDGTSLEAKKHNNRN

SEQ ID NO: 31953 - DNA, 2930 bp, Arabidopsis thaliana
  misc_feature (1)..(2930): Ceres Seq. ID no. 13591795
aaatctcctcacctgcaagagaaaaaaaaaactttcattttattcgtcgtcagtttcatcttgttgcttcggagcgagcgagaattatcgtcggagaatttatcgtctctctctctgaaaattctgatcggtgaagaatcgtcggatcgaaagttcgtttatcttctcgtttacgtttccgtgatttaaatcctttggggtttttttttcttggtaatgtctgtgtttctgaatgtgtggttgatttttgttcgtacactttactttgatcgattaggtttatgtatagttaattgaaattttttggaagatttcagaagaagaagagaagaaacaatccgtaatctagacccttgaattgacctaataataggatacatatgatgactatgaagcagtctttgagtggcagggttcttaggggggtctttggtatctatctgtaggagggcttttaggtgctgtttcgggagattaaagccagattcaaggtgagtctgagagcttggttcttgtatcttcttgtttaccaatgggaatctaggtcactgagaaaccatccttcttgttgatctagtggaaaaaatcgattatttttctatcccaagtagttgctttttctttcttaaccttaacttgtgcaatcttcattctacctaagcatttccccttgataatgaaactctttaatcatctctgatttggccaagagtgttctttttttttgtcatctcatctatggtggattaacagaggttcctcttagttattcttcaagaaggcggcatgaatgctcactttgtttgtagtctgcttatctcagctatggtctccatagtgagtttcccttagagcatatctcgttgttgtccatgatgaagtttttgctccatgcggatcttgtgaacttgctagtagaatttttccgggtaacggcatcagaagatttttattccttcgattatggggttaccatttaggtcaagccaaaacaggtcagctttaaagatgggggtccattaactaggagtacccttcaagcctttgtttccttaaagaaatttctgattcgtatgttgactgaagagatctggtgcaaagtggcagtgggaggtaggtctatcctctttggacacttacccatctctttaaaacccggttatcccaagttttatgtcagtcccaaaccttgtttgatggtgtttgccttgcttttacgataggttggtcatatccggttgaaactggatagatttcccaagattgaaggactgaagtgaacactcaatgtgctaagcttttatttctctatgaaagctccatcaaccaagagggctgtttttagttgtttaacagggtatttgtagatcttcttgttttggtgattgttcctcttggagaaagctgattggagctgtttcaaaaatggattgtcttggtgtggtgcaatgtagatggaagcaacagttcatcgagtttttttgctggattttcaggtgactgataatgtttgcgaaatgaggaatagattttctaaatattttcttacttgcaggtttcataagctttccatcaactagcagtatctgccaatatcacagacagataattcgtaatgggagacgtatatttcaaccatttcgctcagcaactgcagatgtctgaccaagagaagggtgaaatgtcaagacattcacaccctcattcaatcaatgaagaatctgagtcgtcaactctggaaagggtagcagcagagtcattaacaaacaaagtccttgatagaggactaatggagtatgggtaggttttactccctatttgtatattcttagctttgagcttgtttcttggatgaatacccctatgttcttgcagatgtccacattacagaagaaggtgttgcattagagctccttgctgtaatgagatctttggttgccatcactgtcattatgaggcgaagaacaacataaatgtagatcagaagcagaggcatgatattcctcgccaccaagttgaacaggttatttgtttactttgtggtactgaacaagaggtgggccaaatttgtatccactgtggagtgtgcatggggaagtacttctgtaaagtctgcaagctctacgatgatgatacgtctaaaaaacagtaccactgcgatgggtgtggaatttgcagaatcggaggacgtgaaaatttctttcactgttacaagtgtggctgttgttattcaatcctcctcaagaacggtcacccttgtgtcgaaggagcaatgcatcacgactgccccatttgctttgagtttctgtttgaatcacggaacgatgtgacggttttaccatgtggacacacaattcatcagaagtgcttggaggaaatgagagatcattaccaatatgcgtgcccactttgctcaaaatctgtatgcgacatgtcaaaagtgtgggagaagtttgacatggagattgcggctacaccaatgccagaaccataccagaacagaatggttcagattctctgcaacgactgtgggaagaaagcagaggtacagtaccatgtggtggctcagaaatgcccaaactgcaaatcatacaacactcgccaaaccagaggctgaagctttttttgaagttgatttgctatcaaatgcaattaagagcttttcacttgatccaatagtgtcattggatccttaacttgaggactgggtctctcgagtctatctcttctcactctcttcttcaatattctctgagtcgtctcttgttcactagtctatatgtttccttggtgttgtttgatggtctggttagtttccattgtgattcatctcctttgtaattctgcggctttattgaaaagtttcgtttaatctgttaaaaaccctaaaaaatttgaacttgtatgaataaaaaattttagctgctcgc

SEQ ID NO: 31954 - protein, 175 aa, Arabidopsis thaliana
  misc_feature (1)..(175): Ceres Seq. ID no. 13591796
MGKYFCKVCKLYDDDTSKKQYHCDGCGICRIGGRENFFHCYKCGCCYSILLKNGHPCVEGAMHHDCPICFEFLFESRNDVTVLPCGHTIHQKCLEEMRDHYQYACPLCSKSVCDMSKVWEKFDMEIAATPMPEPYQNRMVQILCNDCGKKAEVQYHVVAQKCPNCKSYNTRQTRG

SEQ ID NO: 31955 - protein, 114 aa, Arabidopsis thaliana
  misc_feature (1)..(114): Ceres Seq. ID no. 13591797
MHHDCPICFEFLFESRNDVTVLPCGHTIHQKCLEEMRDHYQYACPLCSKSVCDMSKVWEKFDMEIAATPMPEPYQNRMVQILCNDCGKKAEVQYHVVAQKCPNCKSYNTRQTRG

SEQ ID NO: 31956 - protein, 111 aa, Arabidopsis thaliana
  misc_feature (1)..(111): Ceres Seq. ID no. 13591798
MIFLATKLNRLFVYFVVLNKRWAKFVSTVECAWGSTSVKSASSTMMIRLKNSTTAMGVEFAESEDVKISFTVTSVAVVIQSSSRTVTLVSKEQCITTAPFALSFCLNHGTM

SEQ ID NO: 31957 - DNA, 1882 bp, Arabidopsis thaliana
  misc_feature (1)..(1882): Ceres Seq. ID no. 13591806
agtttttaaaaaccttctctcatcctcttcctcaagcctccctcctcctctttaatctcaccagtcaccatgaaagtttagagattttttgaaagaacaaacagatatcgaattcgagttttgcaaaaatggtatcggtggaggaacctttatctcattccaattccactcgctttccgttaacaaccgatttctacggttcatcatcgccgtcggcggcgaggttacaccgtcaagctggccggtcgatgagaacagtgagatctaacttctatcaaagcggagatcaatcttgctcattcgtcggctcaatcggcgataaatcagagtatgcgtcggagtttctctcggattccgtcatcgacatgagactcggcgagcttgctttgaaaaacagtaattctctcaattcaaacgcttcctcaatgaaagaggaagcgtttctcgacatttctcaggcgtttagtgatttttccgcttgtagtagtgatatctccggcgagttacagcgtcttgcttgcttgccgtcgccggaggctgatagaaatgagagcggcggagataacgaagcggagcatgatccagagttagagagagagccttgtctagggtttctacagagagaaaacttctctacagagattatcgagtgtatttcgccggaagatctgcagccaactgtgaaactatgcatcgacggacttcgttcctcttcggtggcgataaagcgatctgctgcggcgaagctacggctattggcgaagaatcgagcggataatcgtgtgttgattggggaatctggagctattcaagctttgattccacttcttcgttgtaacgatccatggacgcaagagcacgcagttacagctctgttaaacctcctcgttacacgaccagaacaaagctgtaatcgccgcaggaggagcgattaaatcactagtgtgggtactcaaaacggggacggagacttcaaagcagaacgctgcatgtgctttgcttagtttggcgctattggaggagaacaaaggctcaatcggagcttgcggtgctattccgccgctggtttctcttctgttgaacggatcttgcaggggaaagaaggatgcgttgacgacgctctacaagctgtgtacgcttcagcaaaacaaggagagagcggtcactgctggagcggtgaagccgttggtggaccttgtggctgaggaagggactggtatggcggagaaagctatggtggttctgagtagccttgcagcgatagatgatggcaaagaggctattgtcgaggaaggagggatcgcagcgcttgttgaggccatcgaggatggatctgtgaaagggaaagaatttgcgatcttgacgctgttgcagctttgttctgatagcgttagaaaccgtgggttgcttgtgagggaaggcgcgattcctccgcttgtgggcctctctcagagcggctccgtcagtgttagagctaagcgcaaggcagaaagacttctggggtatcttcgggagccaaggaaggaggcaagttcatcaagcccatgaaatgcaaccatgtggaggtttcatcagtctagtatgtatatactgagtgtatgtttggtgggttttgtatagcgtcttttgtgtagactgtaaaagagagatcaaatgattaccagaaacttgactgacttttgatctctctcatgtattgatggttaagctagtttttgaggagtttcaagggagagtgcttatttatttggtttacaagtctagcattcaggttttggcttctggtttgtgagggtgggtggattatgctgatttttaaggcaaaaagctttgtagtagcgtcggcaaatggcttgttcaagaactaagcaatttttaatcg

SEQ ID NO: 31958 - protein, 268 aa, Arabidopsis thaliana
  misc_feature (1)..(268): Ceres Seq. ID no. 13591807
MVSVEEPLSHSNSTRFPLTTDFYGSSSPSAARLHRQAGRSMRTVRSNFYQSGDQSCSFVGSIGDKSEYASEFLSDSVIDMRLGELALKNSNSLNSNASSMKEEAFLDISQAFSDFSACSSDISGELQRLACLPSPEADRNESGGDNEAEHDPELEREPCLGFLQRENFSTEIIECISPEDLQPTVKLCIDGLRSSSVAIKRSAAAKLRLLAKNRADNRVLIGESGAIQALIPLLRCNDPWTQEHAVTALLNLLVTRPEQSCNRRRRSD

SEQ ID NO: 31959 - protein, 228 aa, Arabidopsis thaliana
  misc_feature (1)..(228): Ceres Seq. ID no. 13591808
MRTVRSNFYQSGDQSCSFVGSIGDKSEYASEFLSDSVIDMRLGELALKNSNSLNSNASSMKEEAFLDISQAFSDFSACSSDISGELQRLACLPSPEADRNESGGDNEAEHDPELEREPCLGFLQRENFSTEIIECISPEDLQPTVKLCIDGLRSSSVAIKRSAAAKLRLLAKNRADNRVLIGESGAIQALIPLLRCNDPWTQEHAVTALLNLLVTRPEQSCNRRRRSD

SEQ ID NO: 31960 - protein, 189 aa, Arabidopsis thaliana
  misc_feature (1)..(189): Ceres Seq. ID no. 13591809
MRLGELALKNSNSLNSNASSMKEEAFLDISQAFSDFSACSSDISGELQRLACLPSPEADRNESGGDNEAEHDPELEREPCLGFLQRENFSTEIIECISPEDLQPTVKLCIDGLRSSSVAIKRSAAAKLRLLAKNRADNRVLIGESGAIQALIPLLRCNDPWTQEHAVTALLNLLVTRPEQSCNRRRRSD

SEQ ID NO: 31961 - DNA, 1809 bp, Arabidopsis thaliana
  misc_feature (1)..(1809): Ceres Seq. ID no. 13591810
tggcaacacaaaaacatacacactactaataaaccatgaagcttcttatgctcgcctttgtttttctattagctttggcgacttgtaaaggtgacgagtttgtttgtgaagagaacgagccattcacatgtaaccaaactaaacttttcaacagtggcaatttcgaaaaaggcttcatcttcggtgttgcatcttctgcttaccaggtggaaggcggtagaggccgtggacttaacgtttgggatagcttcactcaccgattcccagagaaaggtggagctgatttgggaaatggagacactacttgtgactcatatactctttggcagaaagatatagacgtgatggacgagctcaactctactggctacagattctccattgcgtggtcaagactccttccaaaaggaaagaggagcaggggagtgaacccaggagctattaagtactacaacggtctcatagatggcctcgtcgcaaagaatatgacgccctttgttaccctctttcattgggaccttcctcaaacactacaagatgaatataacggtttcttgaacaaaacgatcgtagacgatttcaaggattacgcggatctatgtttcgagttatttggtgatagggtaaagaactggatcaccatcaaccagctatacacagtgcctactagaggatatgcattgggaacagatgcacccggtcgatgttctcctaagattgacgttagatgtcccggcggaaattcgtcaacagaaccctatattgttgcacataaccagcttcttgctcatgcagcggccgttgatgtttacaggacgaaatataaggatgaccaaaaaggtatgattggaccagtgatgataactagatggtttcttccatttgatcatagtcaagagagcaaagatgcaactgagcgggctaaaatatttttccatggatggttcatggggcctctaacagaaggtaaatacccagacatcatgagggaatatgttggtgatcggcttccagagttcagtgaaacagaagccgcacttgtaaagggttcatatgattttcttggtctcaactattacgtcactcaatacgcccaaaataatcagacgattgttccttcggacgtacacactgccttgatggactcacgcacaactctcacatctaaaaatgcaactggtcatgctcctggtccaccgttcaatgcagccagttactactacccaaaaggcatttactacgtaatggattacttcaaaaccacttacggtgaccctttaatatatgtcactgagaatggatttagtaccccaggtgatgaggactttgagaaggctactgccgattacaagcggattgattatctctgtagtcatctctgtttcctcagtaaagtcatcaaggagaagaatgtcaacgtgaaaggatattttgcttggtctcttggggataattacgaattctgtaacggatttaccgtcagattcggactaagttacgttgatttcgcaaatatcactggtgatagagacctcaaagcatctggcaaatggttccagaagttcataaacgttaccgacgaagactctacgaaccaagatctactccgctcaagcgtctcctccaagaaccgtgatcggaagagtcttgcagatgcatgaaatatccaatccactatatgtccaccaagatcatcttcatgtttcctctttctacttgctccatagataaggagctttttctaccatatgtattaaaataaaatcctaataaaagatgatcaataataataaagactttgtttactgc

SEQ ID NO: 31962 - protein, 541 aa, Arabidopsis thaliana
  misc_feature (1)..(541): Ceres Seq. ID no. 13591811
MKLLMLAFVFLLALATCKGDEFVCEENEPFTCNQTKLFNSGNFEKGFIFGVASSAYQVEGGRGRGLNVWDSFTHRFPEKGGADLGNGDTTCDSYTLWQKDIDVMDELNSTGYRFSIAWSRLLPKGKRSRGVNPGAIKYYNGLIDGLVAKNMTPFVTLFHWDLPQTLQDEYNGFLNKTIVDDFKDYADLCFELFGDRVKNWITINQLYTVPTRGYALGTDAPGRCSPKIDVRCPGGNSSTEPYIVAHNQLLAHAAAVDVYRTKYKDDQKGMIGPVMITRWFLPFDHSQESKDATERAKIFFHGWFMGPLTEGKYPDIMREYVGDRLPEFSETEAALVKGSYDFLGLNYYVTQYAQNNQTIVPSDVHTALMDSRTTLTSKNATGHAPGPPFNAASYYYPKGIYYVMDYFKTTYGDPLIYVTENGFSTPGDEDFEKATADYKRIDYLCSHLCFLSKVIKEKNVNVKGYFAWSLGDNYEFCNGFTVRFGLSYVDFANITGDRDLKASGKWFQKFINVTDEDSTNQDLLRSSVSSKNRDRKSLADA

SEQ ID NO: 31963 - protein, 537 aa, Arabidopsis thaliana
  misc_feature (1)..(537): Ceres Seq. ID no. 13591812
MLAFVFLLALATCKGDEFVCEENEPFTCNQTKLFNSGNFEKGFIFGVASSAYQVEGGRGRGLNVWDSFTHRFPEKGGADLGNGDTTCDSYTLWQKDIDVMDELNSTGYRFSIAWSRLLPKGKRSRGVNPGAIKYYNGLIDGLVAKNMTPFVTLFHWDLPQTLQDEYNGFLNKTIVDDFKDYADLCFELFGDRVKNWITINQLYTVPTRGYALGTDAPGRCSPKIDVRCPGGNSSTEPYIVAHNQLLAHAAAVDVYRTKYKDDQKGMIGPVMITRWFLPFDHSQESKDATERAKIFFHGWFMGPLTEGKYPDIMREYVGDRLPEFSETEAALVKGSYDFLGLNYYVTQYAQNNQTIVPSDVHTALMDSRTTLTSKNATGHAPGPPFNAASYYYPKGIYYVMDYFKTTYGDPLIYVTENGFSTPGDEDFEKATADYKRIDYLCSHLCFLSKVIKEKNVNVKGYFAWSLGDNYEFCNGFTVRFGLSYVDFANITGDRDLKASGKWFQKFINVTDEDSTNQDLLRSSVSSKNRDRKSLADA

SEQ ID NO: 31964 - protein, 438 aa, Arabidopsis thaliana
  misc_feature (1)..(438): Ceres Seq. ID no. 13591813
MDELNSTGYRFSIAWSRLLPKGKRSRGVNPGAIKYYNGLIDGLVAKNMTPFVTLFHWDLPQTLQDEYNGFLNKTIVDDFKDYADLCFELFGDRVKNWITINQLYTVPTRGYALGTDAPGRCSPKIDVRCPGGNSSTEPYIVAHNQLLAHAAAVDVYRTKYKDDQKGMIGPVMITRWFLPFDHSQESKDATERAKIFFHGWFMGPLTEGKYPDIMREYVGDRLPEFSETEAALVKGSYDFLGLNYYVTQYAQNNQTIVPSDVHTALMDSRTTLTSKNATGHAPGPPFNAASYYYPKGIYYVMDYFKTTYGDPLIYVTENGFSTPGDEDFEKATADYKRIDYLCSHLCFLSKVIKEKNVNVKGYFAWSLGDNYEFCNGFTVRFGLSYVDFANITGDRDLKASGKWFQKFINVTDEDSTNQDLLRSSVSSKNRDRKSLADA

SEQ ID NO: 31965 - DNA, 2663 bp, Arabidopsis thaliana
  misc_feature (1)..(2663): Ceres Seq. ID no. 13591835
acctctcttacctcactctccttaaacctttaatagggtttttaggttactctttgttcaactactacaaactcttttctctttagagattgagagattgtaaaaaaatctcaaatcttttccttcacaactttcaaatctaatggctcctgctttgagtagaagtctctacacatctcctttgacttcagttccaatcactcctgtctcttctcgtctctctcatctgagaagctcgtttctcccacacggcggcgctttaagaaccggcgtttcgtgtagctggaatctcgaaaagagatgtaaccgattcgccgtgaagtgtgacgccgccgtggcggagaaagagaccactgaagaagggtcaggtgagaagtttgagtaccaagctgaggttagtagattgttggatttgattgttcatagcttatacagtcacaaggaggtgtttctcagggagcttgtaagtaatgcaagtgatgctttggataagctgaggttcttgagtgtaacagagccttctttgcttggagatggtggagatcttgagattaggattaagcctgatcctgataacggcaccatcaccataactgatactggtattggaatgacaaaggaagaacttattgattgccttggaactattgctcaaagtggtacttcgaaattcttgaaggctctaaaggaaaacaaggaccttggtgctgacaacggtttgatcggacagtttggtgttgggttttactctgctttcttagttgctgagaaggttgttgtgtccaccaaaagccccaaatctgacaagcaatatgtttgggaatcggttgccgatagtagctcgtatctgatcagagaagaaacagaccctgataacattctacgtcgtggaacacaaatcaccttgtatctgagggaggatgataaatacgaatttgcggagtctacaaggatcaagaacctcgtgaagaattactctcagttcgttgggtttcctatctatacatggcaggagaaatcaaggactatagaggtcgaagaggacgaaccagttaaggaaggagaagagggtgagccaaagaaaaagaagaccactaaaactgagaagtattgggattgggaactagccaacgagaccaaaccgctatggatgcgcaattcgaaggaagtggaaaaaggagagtacaatgagttctacaaaaaggctttcaatgagttcttggatccacttgctcacacacacttcacaactgagggtgaggttgagttcaggagcattttgtacatccctgggatgggtcctcttaacaatgaagatgttacaaacccgaaaacaaagaacattcgtctctacgtgaagcgtgtgtttatctctgacgattttgatggagagcttttcccgagatatctgagctttgtgaagggagttgtggactctgatgatcttcctcttaatgtttctcgtgaaattctccaagaaagcagaattgtaagaatcatgagaaagaggctcattagaaaaacctttgacatgatacaagaaatctctgagagtgaaaacaaagaggattacaagaaattctgggagaactttggtagattccttaaattgggttgtattgaagacaccggtaaccacaagcgtatcacaccgctacttagattcttcagttccaagaatgaagaggaattgacaagcttggatgattatatcgagaacatgggagagaaccaaaaggcgatctactacctcgcaactgatagtcttaaaagtgccaagtctgcccctttcttggagaaactaatccaaaaagatatcgaggttctatatttggttgaaccaatcgatgaagttgctattcagaatttgcaaacctacaaagaaaagaaattcgttgatatcagtaaagaagatttggaactcggagatgaagatgaagtaaaggacagggaagcgaaacaagagtttaaccttctctgtgactggataaaacagcagctcggtgacaaagttgcaaaagtccaagtctcaaaccgtttgagctcttctccttgtgtgcttgtctctggcaaattcgggtggtcagctaatatggaaaggctaatgaaggcacaggctcttggagacacttcaagcctggagttcatgagaggtaggagaatactagagatcaatccagatcatcccatcatcaaagacttgaacgctgcttgtaagaatgcaccagagagcactgaagcaacaagagtggtcgatctcttgtatgacactgctataatatcaagtggattcactcctgatagcccggccgagctcgggaacaagatatatgagatgatggcaatggcggttggaggaagatggggcagagttgaagaagaagaagaaagctcgactgtgaatgaaggagatgacaaaagcggagaaacagaggtagttgaaccatctgaagtgagggcagagagtgatccttggcaagattgatccttttttaccttcttttgtttgcagtgatttttttttgacagaacgctttatctttccattagcagtatcatgggcctaatgaaagcccataattaaatcacgcgtgaacgagatttatccaatacagtatttgtagtttttttttgataattaaaataattttagagaatttaca

SEQ ID NO: 31966 - protein, 780 aa, Arabidopsis thaliana
  misc_feature (1)..(780): Ceres Seq. ID no. 13591836
MAPALSRSLYTSPLTSVPITPVSSRLSHLRSSFLPHGGALRTGVSCSWNLEKRCNRFAVKCDAAVAEKETTEEGSGEKFEYQAEVSRLLDLIVHSLYSHKEVFLRELVSNASDALDKLRFLSVTEPSLLGDGGDLEIRIKPDPDNGTITITDTGIGMTKEELIDCLGTIAQSGTSKFLKALKENKDLGADNGLIGQFGVGFYSAFLVAEKVVVSTKSPKSDKQYVWESVADSSSYLIREETDPDNILRRGTQITLYLREDDKYEFAESTRIKNLVKNYSQFVGFPIYTWQEKSRTIEVEEDEPVKEGEEGEPKKKKTTKTEKYWDWELANETKPLWMRNSKEVEKGEYNEFYKKAFNEFLDPLAHTHFTTEGEVEFRSILYIPGMGPLNNEDVTNPKTKNIRLYVKRVFISDDFDGELFPRYLSFVKGVVDSDDLPLNVSREILQESRIVRIMRKRLIRKTFDMIQEISESENKEDYKKFWENFGRFLKLGCIEDTGNHKRITPLLRFFSSKNEEELTSLDDYIENMGENQKAIYYLATDSLKSAKSAPFLEKLIQKDIEVLYLVEPIDEVAIQNLQTYKEKKFVDISKEDLELGDEDEVKDREAKQEFNLLCDWIKQQLGDKVAKVQVSNRLSSSPCVLVSGKFGWSANMERLMKAQALGDTSSLEFMRGRRILEINPDHPIIKDLNAACKNAPESTEATRVVDLLYDTAIISSGFTPDSPAELGNKIYEMMAMAVGGRWGRVEEEEESSTVNEGDDKSGETEVVEPSEVRAESDPWQD

SEQ ID NO: 31967 - protein, 624 aa, Arabidopsis thaliana
  misc_feature (1)..(624): Ceres Seq. ID no. 13591837
MTKEELIDCLGTIAQSGTSKFLKALKENKDLGADNGLIGQFGVGFYSAFLVAEKVVVSTKSPKSDKQYVWESVADSSSYLIREETDPDNILRRGTQITLYLREDDKYEFAESTRIKNLVKNYSQFVGFPIYTWQEKSRTIEVEEDEPVKEGEEGEPKKKKTTKTEKYWDWELANETKPLWMRNSKEVEKGEYNEFYKKAFNEFLDPLAHTHFTTEGEVEFRSILYIPGMGPLNNEDVTNPKTKNIRLYVKRVFISDDFDGELFPRYLSFVKGVVDSDDLPLNVSREILQESRIVRIMRKRLIRKTFDMIQEISESENKEDYKKFWENFGRFLKLGCIEDTGNHKRITPLLRFFSSKNEEELTSLDDYIENMGENQKAIYYLATDSLKSAKSAPFLEKLIQKDIEVLYLVEPIDEVAIQNLQTYKEKKFVDISKEDLELGDEDEVKDREAKQEFNLLCDWIKQQLGDKVAKVQVSNRLSSSPCVLVSGKFGWSANMERLMKAQALGDTSSLEFMRGRRILEINPDHPIIKDLNAACKNAPESTEATRVVDLLYDTAIISSGFTPDSPAELGNKIYEMMAMAVGGRWGRVEEEEESSTVNEGDDKSGETEVVEPSEVRAESDPWQD

SEQ ID NO: 31968 - protein, 444 aa, Arabidopsis thaliana
  misc_feature (1)..(444): Ceres Seq. ID no. 13591838
MRNSKEVEKGEYNEFYKKAFNEFLDPLAHTHFTTEGEVEFRSILYIPGMGPLNNEDVTNPKTKNIRLYVKRVFISDDFDGELFPRYLSFVKGVVDSDDLPLNVSREILQESRIVRIMRKRLIRKTFDMIQEISESENKEDYKKFWENFGRFLKLGCIEDTGNHKRITPLLRFFSSKNEEELTSLDDYIENMGENQKAIYYLATDSLKSAKSAPFLEKLIQKDIEVLYLVEPIDEVAIQNLQTYKEKKFVDISKEDLELGDEDEVKDREAKQEFNLLCDWIKQQLGDKVAKVQVSNRLSSSPCVLVSGKFGWSANMERLMKAQALGDTSSLEFMRGRRILEINPDHPIIKDLNAACKNAPESTEATRVVDLLYDTAIISSGFTPDSPAELGNKIYEMMAMAVGGRWGRVEEEEESSTVNEGDDKSGETEVVEPSEVRAESDPWQD

SEQ ID NO: 31969 - DNA, 1174 bp, Arabidopsis thaliana
  misc_feature (1)..(1174): Ceres Seq. ID no. 13591839
gtgagggtggttttatctctttggcccaaatttcggtgtaaccaaaaaaatcttcacacacatccttgaccattttcttgttcatcgctctctttcttcttcacaaatcctaaacgagtaggagctatggctgcaccgattgttgatgcggagtacttgaaagagatcactaaggctcgccgtgagctccgttctctcatcgcgaacaagaactgtgctcctatcatgctccgattggcatggcacgatgctggaacctatgatgctcaatcgaagaccggtggacctaatggctctatcaggaacgaagaagagcacactcatggtgccaacagtggtttgaagatcgctctcgatctctgtgagggcgtgaaagctaagcatcccaaaatcacatacgcagacctgtatcagcttgctggtgtggtagcagttgaggttactggtggacctgacatcgtgttcgttcccgggagaaaggattcaaatgtctgccccaaggaaggaagacttcctgatgccaaacaaggtttccaacatctcagagatgtcttctaccgcatgggactatctgataaggatattgtggcactctcagggggtcatactctgggaagggctcacccagagaggtcaggctttgatggaccatggacccaagagccgctgaagtttgacaactcctacttcgtggaactgctgaaaggagaatcagagggcttgttgaaacttccaactgacaagaccttattggaagacccggagttccgtcgtcttgttgagctttatgcaaaggatgaagatgcattcttcagagactacgcggaatcgcacaagaaactctctgagcttggtttcaacccaaactcctcagcaggcaaagcagttgcagacagcacgattctggcacagagtgcgttcggggttgcagttgctgctgcggttgtggcatttggttacttttacgagatccggaagaggatgaagtaaacgaaataggaagtaaaacacgaagcaacgatgctcttatttgggtattaaagaaactattaatcgtctatcgaatctattttgctgctacaagattctaaactctttgaatccacgattctactgtttagtagtaaaaaagttaaaaagtcaatattttgggtccgtgattcatttttgcgat

SEQ ID NO: 31970 - protein, 287 aa, Arabidopsis thaliana
  misc_feature (1)..(287): Ceres Seq. ID no. 13591840
MAAPIVDAEYLKEITKARRELRSLIANKNCAPIMLRLAWHDAGTYDAQSKTGGPNGSIRNEEEHTHGANSGLKIALDLCEGVKAKHPKITYADLYQLAGVVAVEVTGGPDIVFVPGRKDSNVCPKEGRLPDAKQGFQHLRDVFYRMGLSDKDIVALSGGHTLGRAHPERSGFDGPWTQEPLKFDNSYFVELLKGESEGLLKLPTDKTLLEDPEFRRLVELYAKDEDAFFRDYAESHKKLSELGFNPNSSAGKAVADSTILAQSAFGVAVAAAVVAFGYFYEIRKRMK

SEQ ID NO: 31971 - protein, 254 aa, Arabidopsis thaliana
  misc_feature (1)..(254): Ceres Seq. ID no. 13591841
MLRLAWHDAGTYDAQSKTGGPNGSIRNEEEHTHGANSGLKIALDLCEGVKAKHPKITYADLYQLAGVVAVEVTGGPDIVFVPGRKDSNVCPKEGRLPDAKQGFQHLRDVFYRMGLSDKDIVALSGGHTLGRAHPERSGFDGPWTQEPLKFDNSYFVELLKGESEGLLKLPTDKTLLEDPEFRRLVELYAKDEDAFFRDYAESHKKLSELGFNPNSSAGKAVADSTILAQSAFGVAVAAAVVAFGYFYEIRKRMK

SEQ ID NO: 31972 - DNA, 1152 bp, Arabidopsis thaliana
  misc_feature (1)..(1152): Ceres Seq. ID no. 13591850
ggagaaagaagagaaatcaatcggattagttgcagaagtgcaatgcattgcggatgtgtattcgcttcacaaactgtgtcatcacttctcccatttgaaattaaaacctatgcgtcaaagcttcgagcttcgtcagcccaattaccgagaacccagattcagataaacccttcagatgatctctctatctacggttcagataaatctccggcgaatagagtttcgttgccgtctcatgtaaattctatcaccagtactacaaacccttttgtcaaacactgcttgaagctccgccaaagttcctcgtatcgccacgctcatggctctgttcttgtcgtcggaactatccccatcagggaagtatgtatgtttcaaacgaataagcaaggaatgaccactgaaattgagtgcctacttcttcatgaggaagctaagattccacaaggattagagagtctaagtatccgaattgttagagtaagttctttagtgatgaagaaactctctggagtgcaatctactgaatctgttgaagccattgccttgatgagaatccctagcagctttactgatcttaaagatgataaagacatcataacagactgcaacaaatggttcccttctgctcacagagttcttgttctggacagcatacaggatccagggaaccttggcacattagtcagatcagctatggcttttaattgggatggtgcatttctacttccgggttgttgcgatccgtacaacgacaaagctcttcgagcaagccgaggtgcttcgtttcagctacctatagtttccgggaattggaaccatcttaagcttctagaaaatgagttccagatgaagctattagctggtcatccagcaacgactactcagaaactgaaacctgtctccaaactttcggtagagtttgctcaatctttagcagagaagcctttatgcttgattttaggtagtgaagggaatggtttgtctgagcaggcacggaaagtatgcgtgctagtgagcattcccatggcaggtgactttgaatctcttaacgtctctgttgctggtggtattttcttgtacatgcttcaaaatcttgtttaggttgtaaaaccaaaatataaacttgaaaacagttatggatcttataatgcg

SEQ ID NO: 31973 - protein, 366 aa, Arabidopsis thaliana
  misc_feature (1)..(366): Ceres Seq. ID no. 13591851
GERREINRISCRSAMHCGCVFASQTVSSLLPFEIKTYASKLRASSAQLPRTQIQINPSDDLSIYGSDKSPANRVSLPSHVNSITSTTNPFVKHCLKLRQSSSYRHAHGSVLVVGTIPIREVCMFQTNKQGMTTEIECLLLHEEAKIPQGLESLSIRIVRVSSLVMKKLSGVQSTESVEAIALMRIPSSFTDLKDDKDIITDCNKWFPSAHRVLVLDSIQDPGNLGTLVRSAMAFNWDGAFLLPGCCDPYNDKALRASRGASFQLPIVSGNWNHLKLLENEFQMKLLAGHPATTTQKLKPVSKLSVEFAQSLAEKPLCLILGSEGNGLSEQARKVCVLVSIPMAGDFESLNVSVAGGIFLYMLQNLV

SEQ ID NO: 31974 - protein, 352 aa, Arabidopsis thaliana
  misc_feature (1)..(352): Ceres Seq. ID no. 13591852
MHCGCVFASQTVSSLLPFEIKTYASKLRASSAQLPRTQIQINPSDDLSIYGSDKSPANRVSLPSHVNSITSTTNPFVKHCLKLRQSSSYRHAHGSVLVVGTIPIREVCMFQTNKQGMTTEIECLLLHEEAKIPQGLESLSIRIVRVSSLVMKKLSGVQSTESVEAIALMRIPSSFTDLKDDKDIITDCNKWFPSAHRVLVLDSIQDPGNLGTLVRSAMAFNWDGAFLLPGCCDPYNDKALRASRGASFQLPIVSGNWNHLKLLENEFQMKLLAGHPATTTQKLKPVSKLSVEFAQSLAEKPLCLILGSEGNGLSEQARKVCVLVSIPMAGDFESLNVSVAGGIFLYMLQNLV

SEQ ID NO: 31975 - protein, 244 aa, Arabidopsis thaliana; identical to SEQ ID NO: 27569
  misc_feature (1)..(244): Ceres Seq. ID no. 13591853

SEQ ID NO: 31976 - DNA, 2271 bp, Arabidopsis thaliana
  misc_feature (1)..(2271): Ceres Seq. ID no. 13591858
atgagccaaccaccgaccaatccgccatgaatatatctcagattattttcttcgcgtcccttcttctacggcttcacttatcaacggcggaacatcaaaattcaaacgctggtgatggagacaccatcatattcaccactctaggacgatcgcactacgaatttgacatattcgccctctccacgactcaaccgccgtcagtttccggagagctccgaatcaccgatggggaatcggtaaatttcaacggctatttcccgtctccttctccggctctattatctctccttcccgacgaaaccctaattcaaatggaagattcgtctcctctgcatctcatatacgtcaccgagagaaacggtacttctagcttgtactacgatctagtttacggcggtaattctgattttaaaacgaaacgaagatcggtgttagaagcaccgtctcgagtccaagttccgttgttatcccgctttgatcatctgagtggcatgacggtaaattcttttaaagataagcctagtttgagtggtgagtttattgtctacgtgtcaacccatgagagctcaggtgagccgagagcaagctggaccgccgtttactctaccgagttaaaaaccgggttaaccaggcggttaacaccgagtggtgtagctgatttcagcccggcggtatcgccttccggaaatttaacggctgtggcttcatacggagagagaggctggacaggggaagttgaagagctacgtacggacatctatgtattcttgactcgggatgggtctcaccgtgtcaaggtggtggagcacggtggttggccgtgttgggttgatgagtcgactctgtatttccatagaagaagtgaggaggatggttggatcagcgtttaccgagccatcttacctgaaaacggaccgttgactactgagtcggtgacaattcagcgagtcacaccaccgggagttcacgctttcacaccggccacgtcaccaaacaaccacgagttcgttgcggtagctacaaggagaccaggctcggattaccgccacgtggagttgtttgatctaaagaggaatgagtttatagagttgactcgtttggtggcgccaaagagtcatcacttgaatccattcttgtcccctgactcgtctcgagtcggatatcatagttgtagaggcgatgctaatggacggagaagtcctctgctcttccttgaaaatattcaaaccactacaagggacctctctctctttagaattgatggttcgtttccttcgttctcacctggaggtgatcgtatcgcatacgttaagatgcctggtgtgtttgtggtgaagccggatggttcagggcagcgtgaagtgtacaagggaatggcgttttcgacagcttgggatccggttcgacctggaattgtgtactctagctcaggtccaacgtttgctacagagagaacagaggttgatgttatctctattgacgttgatgcagccgataagtcatcttccgtgaggaggctaacgacaaacgggaagaacaatgctttcccttggccatctcctgatggtaagcggatagtgtttcgttcggggcggactggtcacaaaaacctctacataatggatgctgagaaaggagaaagcggtggtctatggaggttaaccgaaggtgcgtggaccgacacaatgtgtaactggtcaccggatggggaatggatcgcgtttgcatcagatcgagaaagccctggctcgggtagttttgagctcttcttgatccaccccaacggaacagggttaaggaagctcatccaaagcgggacgggtgggagaacaaaccacccgatcttcagcccggacagtaaatcattagtcttcacttctgattatgctggaatctcggcggaaccgatctcgaacccgcatcattaccagccatacggtgatatcttcacggtgaaattagatggctctaatgtgaggaggctaacgcataactcttatgaagatgggacaccggcatgggcccctcggttcatccaccccaacaatgtggagctacaaaggaggaatgattctaggtgctcgttcgaagactgtcactggctcaacaagtaccctacactaaaaggccgaaaaatatcttgttaatatgtatctacagttttgtatcccagcttgtaactctacttatagatttgtatgagactgccactgtatatgcataagactttgtattatagagatcgttaatgtgatatgtatatcatattgt

SEQ ID NO: 31977 - protein, 714 aa, Arabidopsis thaliana
  misc_feature (1)..(714): Ceres Seq. ID no. 13591859
EPTTDQSAMNISQIIFFASLLLRLHLSTAEHQNSNAGDGDTIIFTTLGRSHYEFDIFALSTTQPPSVSGELRITDGESVNFNGYFPSPSPALLSLLPDETLIQMEDSSPLHLIYVTERNGTSSLYYDLVYGGNSDFKTKRRSVLEAPSRVQVPLLSRFDHLSGMTVNSFKDKPSLSGEFIVYVSTHESSGEPRASWTAVYSTELKTGLTRRLTPSGVADFSPAVSPSGNLTAVASYGERGWTGEVEELRTDIYVFLTRDGSHRVKVVEHGGWPCWVDESTLYFHRRSEEDGWISVYRAILPENGPLTTESVTIQRVTPPGVHAFTPATSPNNHEFVAVATRRPGSDYRHVELFDLKRNEFIELTRLVAPKSHHLNPFLSPDSSRVGYHSCRGDANGRRSPLLFLENIQTTTRDLSLFRIDGSFPSFSPGGDRIAYVKMPGVFVVKPDGSGQREVYKGMAFSTAWDPVRPGIVYSSSGPTFATERTEVDVISIDVDAADKSSSVRRLTTNGKNNAFPWPSPDGKRIVFRSGRTGHKNLYIMDAEKGESGGLWRLTEGAWTDTMCNWSPDGEWIAFASDRESPGSGSFELFLIHPNGTGLRKLIQSGTGGRTNHPIFSPDSKSLVFTSDYAGISAEPISNPHHYQPYGDIFTVKLDGSNVRRLTHNSYEDGTPAWAPRFIHPNNVELQRRNDSRCSFEDCHWLNKYPTLKGRKISC

SEQ ID NO: 31978 - protein, 706 aa, Arabidopsis thaliana
  misc_feature (1)..(706): Ceres Seq. ID no. 13591860
MNISQIIFFASLLLRLHLSTAEHQNSNAGDGDTIIFTTLGRSHYEFDIFALSTTQPPSVSGELRITDGESVNFNGYFPSPSPALLSLLPDETLIQMEDSSPLHLIYVTERNGTSSLYYDLVYGGNSDFKTKRRSVLEAPSRVQVPLLSRFDHLSGMTVNSFKDKPSLSGEFIVYVSTHESSGEPRASWTAVYSTELKTGLTRRLTPSGVADFSPAVSPSGNLTAVASYGERGWTGEVEELRTDIYVFLTRDGSHRVKVVEHGGWPCWVDESTLYFHRRSEEDGWISVYRAILPENGPLTTESVTIQRVTPPGVHAFTPATSPNNHEFVAVATRRPGSDYRHVELFDLKRNEFIELTRLVAPKSHHLNPFLSPDSSRVGYHSCRGDANGRRSPLLFLENIQTTTRDLSLFRIDGSFPSFSPGGDRIAYVKMPGVFVVKPDGSGQREVYKGMAFSTAWDPVRPGIVYSSSGPTFATERTEVDVISIDVDAADKSSSVRRLTTNGKNNAFPWPSPDGKRIVFRSGRTGHKNLYIMDAEKGESGGLWRLTEGAWTDTMCNWSPDGEWIAFASDRESPGSGSFELFLIHPNGTGLRKLIQSGTGGRTNHPIFSPDSKSLVFTSDYAGISAEPISNPHHYQPYGDIFTVKLDGSNVRRLTHNSYEDGTPAWAPRFIHPNNVELQRRNDSRCSFEDCHWLNKYPTLKGRKISC

SEQ ID NO: 31979 - protein, 611 aa, Arabidopsis thaliana
  misc_feature (1)..(611): Ceres Seq. ID no. 13591861
MEDSSPLHLIYVTERNGTSSLYYDLVYGGNSDFKTKRRSVLEAPSRVQVPLLSRFDHLSGMTVNSFKDKPSLSGEFIVYVSTHESSGEPRASWTAVYSTELKTGLTRRLTPSGVADFSPAVSPSGNLTAVASYGERGWTGEVEELRTDIYVFLTRDGSHRVKVVEHGGWPCWVDESTLYFHRRSEEDGWISVYRAILPENGPLTTESVTIQRVTPPGVHAFTPATSPNNHEFVAVATRRPGSDYRHVELFDLKRNEFIELTRLVAPKSHHLNPFLSPDSSRVGYHSCRGDANGRRSPLLFLENIQTTTRDLSLFRIDGSFPSFSPGGDRIAYVKMPGVFVVKPDGSGQREVYKGMAFSTAWDPVRPGIVYSSSGPTFATERTEVDVISIDVDAADKSSSVRRLTTNGKNNAFPWPSPDGKRIVFRSGRTGHKNLYIMDAEKGESGGLWRLTEGAWTDTMCNWSPDGEWIAFASDRESPGSGSFELFLIHPNGTGLRKLIQSGTGGRTNHPIFSPDSKSLVFTSDYAGISAEPISNPHHYQPYGDIFTVKLDGSNVRRLTHNSYEDGTPAWAPRFIHPNNVELQRRNDSRCSFEDCHWLNKYPTLKGRKISC

SEQ ID NO: 31980 - DNA, 2107 bp, Arabidopsis thaliana
  misc_feature (1)..(2107): Ceres Seq. ID no. 13591874
gagggtttccgctttccacacacacagctgcaacactatcttctcagaaatggtaaccgaagctttcgaattcgtcgccgttcctttcaattccgatggctggggacctccagacgcttccgacgtttcctcctccgcctctcccaccagcgtcgccgccgctaatcttctcccgaacgttcctttcgcttccttctcccgttccgataagctcggccgtgtagctgattggactcgcaatctctctaatccatccgctcgtcctaacaccggatccaaatcagatccgtctgcagttttcgatttctccgctttcgcaatcgacgaaggcttcggtctcgcttcctccggtggtaatcccgacgaagacgcagctttccgtctcgtcgacggtaaacctccgccgcgtcctaaattcggacctaaatggcgtttcaatcctcaccacaatcggaatcagcttcctcaacggcgagatgaagaagttgaagctaagaagcgtgatgctgagaaggaacgagctcgtcgtgatcgtctctacaataacaaccgtaacaacatccatcaccaacgccgtgaagctgccgctttcaaatcatccgttgatattcagccggagtggaacatgcttgagcagatccctttctcaacattctcgaagctctcgtacacagttcaagaaccagaagatcttcttctctgtggtggccttgagtactacaaccgccttttcgatcgcataacgccgaaaaacgaacgcagactcgagcgtttcaagaacaggaacttcttcaaagtcactactagtgatgatcctgtgattaggcgtttagctaaggaagacaaagctactgttttcgctactgatgctatattagctgctcttatgtgtgctcctagatctgtttactcttgggatattgttattcaacgtgttggtaacaaactgttctttgacaagagagatggatcacagcttgatttgttgtctgtgcatgagacatctcaagagccattgcctgagtctaaagatgatatcaattctgctcattctctaggtgtggaagctgcttacatcaatcagaacttttcgcagcaggttttggttagagatggaaagaaggaaacttttgatgaagccaatccatttgctaatgaaggtgaagagattgcttctgttgcttataggtatagaaggtggaagcttgatgataatatgcatcttgttgcgaggtgtgagttacagagtgttgctgatctcaacaaccaaaggtcgtttcttactttgaatgctcttaacgagtttgatcctaagtactctggtgttgattggagacagaagcttgaaactcagagaggtgcggttttagctacagaattgaagaacaatggaaataagttggctaaatggactgcacaagctttattggctaatgctgatatgatgaagattggttttgtctctagggttcatcctcgtgatcatttcaaccatgttatattatctgttttggggtataagccgaaggatttcgctggacagattaatctcaacacttctaacatgtgggggattgtgaaatccatagttgatctgtgtatgaaactaagcgaagggaagtatgttcttgtgaaggatccatcgaagcctcaagtgaggatttatgaggttccacctgatgctttcgagaatgattacgttgaggaaccgttgcctgaagatgaacaggttcagccaactgaggaaaacacagagggagcagaagcaagtgtagctgcaactaaagaaaccgaggagaagaaagctgatgatgctcaagcttgatggttataaagtcaggtccaaagtctacacctttcgtttctgggttcttttgagagttgaagcttcaatcaaacaacaacaatggaggttccttttttaattatcttgtcctttttcaaatttttgtggtactgctgtaattttaagtcagaaatgagattgtagaacactatcttcgtgacatcttttggaaaatcattacggattgtttacagaacagaaatctttttactatgactcttatagccaccaaattttcttgaatcattttgcattagtttt

SEQ ID NO: 31981 - protein, 607 aa, Arabidopsis thaliana
  misc_feature (1)..(607): Ceres Seq. ID no. 13591875
RVSAFHTHSCNTIFSEMVTEAFEFVAVPFNSDGWGPPDASDVSSSASPTSVAAANLLPNVPFASFSRSDKLGRVADWTRNLSNPSARPNTGSKSDPSAVFDFSAFAIDEGFGLASSGGNPDEDAAFRLVDGKPPPRPKFGPKWRFNPHHNRNQLPQRRDEEVEAKKRDAEKERARRDRLYNNNRNNIHHQRREAAAFKSSVDIQPEWNMLEQIPFSTFSKLSYTVQEPEDLLLCGGLEYYNRLFDRITPKNERRLERFKNRNFFKVTTSDDPVIRRLAKEDKATVFATDAILAALMCAPRSVYSWDIVIQRVGNKLFFDKRDGSQLDLLSVHETSQEPLPESKDDINSAHSLGVEAAYINQNFSQQVLVRDGKKETFDEANPFANEGEEIASVAYRYRRWKLDDNMHLVARCELQSVADLNNQRSFLTLNALNEFDPKYSGVDWRQKLETQRGAVLATELKNNGNKLAKWTAQALLANADMMKIGFVSRVHPRDHFNHVILSVLGYKPKDFAGQINLNTSNMWGIVKSIVDLCMKLSEGKYVLVKDPSKPQVRIYEVPPDAFENDYVEEPLPEDEQVQPTEENTEGAEASVAATKETEEKKADDAQA

SEQ ID NO: 31982 - protein, 591 aa, Arabidopsis thaliana
  misc_feature (1)..(591): Ceres Seq. ID no. 13591876
MVTEAFEFVAVPFNSDGWGPPDASDVSSSASPTSVAAANLLPNVPFASFSRSDKLGRVADWTRNLSNPSARPNTGSKSDPSAVFDFSAFAIDEGFGLASSGGNPDEDAAFRLVDGKPPPRPKFGPKWRFNPHHNRNQLPQRRDEEVEAKKRDAEKERARRDRLYNNNRNNIHHQRREAAAFKSSVDIQPEWNMLEQIPFSTFSKLSYTVQEPEDLLLCGGLEYYNRLFDRITPKNERRLERFKNRNFFKVTTSDDPVIRRLAKEDKATVFATDAILAALMCAPRSVYSWDIVIQRVGNKLFFDKRDGSQLDLLSVHETSQEPLPESKDDINSAHSLGVEAAYINQNFSQQVLVRDGKKETFDEANPFANEGEEIASVAYRYRRWKLDDNMHLVARCELQSVADLNNQRSFLTLNALNEFDPKYSGVDWRQKLETQRGAVLATELKNNGNKLAKWTAQALLANADMMKIGFVSRVHPRDHFNHVILSVLGYKPKDFAGQINLNTSNMWGIVKSIVDLCMKLSEGKYVLVKDPSKPQVRIYEVPPDAFENDYVEEPLPEDEQVQPTEENTEGAEASVAATKETEEKKADDAQA

SEQ ID NO: 31983 - protein, 399 aa, Arabidopsis thaliana
  misc_feature (1)..(399): Ceres Seq. ID no. 13591877
MLEQIPFSTFSKLSYTVQEPEDLLLCGGLEYYNRLFDRITPKNERRLERFKNRNFFKVTTSDDPVIRRLAKEDKATVFATDAILAALMCAPRSVYSWDIVIQRVGNKLFFDKRDGSQLDLLSVHETSQEPLPESKDDINSAHSLGVEAAYINQNFSQQVLVRDGKKETFDEANPFANEGEEIASVAYRYRRWKLDDNMHLVARCELQSVADLNNQRSFLTLNALNEFDPKYSGVDWRQKLETQRGAVLATELKNNGNKLAKWTAQALLANADMMKIGFVSRVHPRDHFNHVILSVLGYKPKDFAGQINLNTSNMWGIVKSIVDLCMKLSEGKYVLVKDPSKPQVRIYEVPPDAFENDYVEEPLPEDEQVQPTEENTEGAEASVAATKETEEKKADDAQA

SEQ ID NO: 31984 - DNA, 2658 bp, Arabidopsis thaliana
  misc_feature (1)..(2658): Ceres Seq. ID no. 13591878
gaaaagacgaccccattccccttctctatagatagatctcagaatctctccttttttgttggctttacccttatttggccattcctgtcttccactttgtcatcttttccctttctgatgggatccgccgccgaactcacggagcccaccaccgggaccgagaagcttcaccagccaatagaagttgaagaagatgacgaacaaattgttgatttggagaggaaaacattccgtcatggaaagggacacgatactagtgtggacagtagtacaatcaccaacaccagctcgtcgtcgtcttctagcttttccggtgatggtggaacggaagagacccccgatttccacagcaacggcgatggagaacataccgatttagtaaatttggaggtcccggagctagaaactgaaatcgtatttcaccaagagcatgacgacgggaagaattgcatcgtcttcttcgacggagaacaaggttctgagtcagctggtgccatacctgatgctcatgaggagtctcaaactgctgacttgaatggggagcaaacgcagttagaacctgaaaacggttcaacttctgaggataacgaaagatctcgtgaaattgaagaagtactagatggtgatgtctctaaagacttggatgctgttgatccactcgctggtgaggtgatagaggaggaggtggacttcgaagatgttgaatatcatgatgtggagaatatgatggataagcaagagacacatgatttgtactgtccaaactgcgattcttgcatcaccaaaaaggttatcctcaaaagaaggaaacggaagatccgtcgtcatgagctgggagattcaaagcggcctcatttgactgagcctctttttcattcggaagacaatttgccatctctagatggcggtgaaaactctgcaaatgagtcatttgtcttcaagtgcttgtcatgctttaccatatttattcccaaaggtacactagaccgtaaaagttaccttgatatatcaaaacttatttcagatgccatccctttttgtatccaaagcatgctttctttttctggaaaacaaaatcaggggtgagttcaaagccgattcctccccgtcaaggagttgaggggttaaagattcagccaaaccctcaagtggaagctacaggcgattccaattggttcagttcaatatttggcctcaacaaaaaggaatcagctattcagcaaggtggggcatcatctagtgtcttggaagctaatccgccaccacgtgagtccattgtcccagtagttaatccatcgcgtggtaacctaagtcctatgcgaaaggatacgacaggctcagccgttgttcagcctgatgcagccacttcgattcaagtgcaaaatcaaacgatacaagcgaaattgtaaacaatggagctattgttggagacgggcaaaagtttctggctcctatggtggaggagcaaacacagcaaaagattgacaatgatgattctagtacagcagacgggaatcacacgtcagacaaaggacgtctctccccaattcaaccatctcatggcatgagtatactaaacacagtgactaacggacccgacggattgaaagtagaaactacaattcatgaagaaggtgcccctcttctgtttgaaggaaaagacactcctgacacaagcacggcagattttggtctgaccaaagtaacaggtgtgatggacacaggtgacagaggagttattaccggtccagcaaatcctgaaattgatatttcagcagggaatttgctggaagaagggtctctaagggaaccgttaatgagacgagttgttgttcaaggacgtaaactggaaatcttgaaaagcattgtctacggaggtctactagaagccatcacaagccttggtgttatttcatctgccgctggttctggtgcttcaatgttgaatattctggtcttggggcttgcaaacttgcttggcgggcttattcttattattcataatctccaagaacttagagaggaggaacccataagaacaacaacagaagataaccagactaacggtagagaagaagaagaaggtcggtataagcgactccttggacgaagagaaaatttcacacttcacgcaacagtcgcaatcttatccttcataatcaccggaatactccctcctgtagtctactatttctcattcagtgaaaaacacaacaaagactacaaagttgcttcagttttcggggcatctctattctgcatcgtcttgctcgccatagccaaagctcatgtgaggtacccgagaggcagctacctgaagagcattctgtactacgggtcaattgctgtatcggtgtcggggatttcttatgtggttggtaactttctggaacagttgcttgagaagcatggatggtctgatggatcggaaacacctgtgggacagatgatgctttcatcacttatgggaagaaaagccggctttggatactcatcatcgtactgaaactgaatcttgcctggagaatgatccaaactgaaacttgctgcttttctcttttactctgcttttgtgagctctcgttccaaatctttgttgtcggcaaatctttgttgtgacttgtgagtgtagaagaaagtcgtttccacttgtagaat

SEQ ID NO: 31985 - protein, 361 aa, Arabidopsis thaliana
  misc_feature (1)..(361): Ceres Seq. ID no. 13591879
EKTTPFPFSIDRSQNLSFFVGFTLIWPFLSSTLSSFPFLMGSAAELTEPTTGTEKLHQPIEVEEDDEQIVDLERKTFRHGKGHDTSVDSSTITNTSSSSSSSFSGDGGTEETPDFHSNGDGEHTDLVNLEVPELETEIVFHQEHDDGKNCIVFFDGEQGSESAGAIPDAHEESQTADLNGEQTQLEPENGSTSEDNERSREIEEVLDGDVSKDLDAVDPLAGEVIEEEVDFEDVEYHDVENMMDKQETHDLYCPNCDSCITKKVILKRRKRKIRRHELGDSKRPHLTEPLFHSEDNLPSLDGGENSANESFVFKCLSCFTIFIPKGTLDRKSYLDISKLISDAIPFCIQSMLSFSGKQNQG

SEQ ID NO: 31986 - protein, 350 aa, Arabidopsis thaliana
  misc_feature (1)..(350): Ceres Seq. ID no. 13591880
MVEEQTQQKIDNDDSSTADGNHTSDKGRLSPIQPSHGMSILNTVTNGPDGLKVETTIHEEGAPLLFEGKDTPDTSTADFGLTKVTGVMDTGDRGVITGPANPEIDISAGNLLEEGSLREPLMRRVVVQGRKLEILKSIVYGGLLEAITSLGVISSAAGSGASMLNILVLGLANLLGGLILIIHNLQELREEEPIRTTTEDNQTNGREEEEGRYKRLLGRRENFTLHATVAILSFIITGILPPVVYYFSFSEKHNKDYKVASVFGASLFCIVLLAIAKAHVRYPRGSYLKSILYYGSIAVSVSGISYVVGNFLEQLLEKHGWSDGSETPVGQMMLSSLMGRKAGFGYSSSY

SEQ ID NO: 31987 - protein, 322 aa, Arabidopsis thaliana
  misc_feature (1)..(322): Ceres Seq. ID no. 13591881
MGSAAELTEPTTGTEKLHQPIEVEEDDEQIVDLERKTFRHGKGHDTSVDSSTITNTSSSSSSSFSGDGGTEETPDFHSNGDGEHTDLVNLEVPELETEIVFHQEHDDGKNCIVFFDGEQGSESAGAIPDAHEESQTADLNGEQTQLEPENGSTSEDNERSREIEEVLDGDVSKDLDAVDPLAGEVIEEEVDFEDVEYHDVENMMDKQETHDLYCPNCDSCITKKVILKRRKRKIRRHELGDSKRPHLTEPLFHSEDNLPSLDGGENSANESFVFKCLSCFTIFIPKGTLDRKSYLDISKLISDAIPFCIQSMLSFSGKQNQG

SEQ ID NO: 31988 - DNA, 1514 bp, Arabidopsis thaliana
  misc_feature (1)..(1514): Ceres Seq. ID no. 13591887
tcctctcgatctctgatctccctgtcttctgtctacgcttcgtcgccggccgatttctcccagactcgtcttaccgcctccggtcgaaaccctagattcccggaggacgaaattcgttttttcgccggaactaaattaaggagatttgagaggctatgggtacaacaacgacaacaagcgctgtgtatatccatgttatcgaggatgtcgtcaacaaagttcgtgaggagttcattaacaacggaggtcctggcgagagtgttctcagcgagcttcaaggaatttgggagacgaagatgatgcaagccggagtcttgaatggaccaatagagaggtcatcggctcagaagccaacacctggtggtccactgactcatgatttgaatgttccttatgaaggtacagaggagtacgagactcccactgctgaaatgctcttccctcctacaccattgcagactccccttccaacgccgcttcccggtactgctgataactcatccatgtataacatccctaccggctcaagtgattatcccactcctggaactgagaatggagtcaacattgatgttaaagcaagacctagtccttatatgccaccgccttctccgtggacaaatcctagacttgatgtcaatgttgcttatgtggatggccgtgatgagcctgagagaggaaactctaaccagcagtttacgcaggatttatttgtgccatcctctgggaaacgaaaacgtgatgattcttctggacattatcaaaatggtggatctatacctcaacaggatggtgcaggcgatgctatccctgaggcaaactttgagtgtgatgcattccgcataacctctattggcgatagaaaggtaccacgagacttcttcagctcatcatcgaagattcctcaggttgatgggccaatgcctgacccttatgatgaaatgctctctacaccaaatatatatagttatcaaggacccagtgaagagtttaacgaggccagaactcctgctccaaacgagatccaaacgagcactcctgttgctgtacaaaacgatatcattgaagatgatgaagagctgttgaacgaagatgatgatgatgacgagttggacgacctagaaagtggcgaggatatgaacacacaacacctggttttagctcaatttgacaaggtgacgcgcacaaagagcaggtggaagtgcagtctgaaagacgggatcatgcatataaacgataaggacattctcttcaacaaagcagcaggcgagtttgacttctgatcttaacactagcaatgatgcttctaggaaagtccttcaaatgtccagtgtctttctttttaccttatgatttaagaccgaccgagagagacatgagtattcatgggaaagtgtactctggttggcttgttgtacaaaaagaaaagttttttctgtcgaagaaggcgtatcaactttcaccttgtttcatgaactcttattgtctttcacgcaatggaaaattaacttccc

SEQ ID NO: 31989 - protein, 375 aa, Arabidopsis thaliana
  misc_feature (1)..(375): Ceres Seq. ID no. 13591888
MGTTTTTSAVYIHVIEDVVNKVREEFINNGGPGESVLSELQGIWETKMMQAGVLNGPIERSSAQKPTPGGPLTHDLNVPYEGTEEYETPTAEMLFPPTPLQTPLPTPLPGTADNSSMYNIPTGSSDYPTPGTENGVNIDVKARPSPYMPPPSPWTNPRLDVNVAYVDGRDEPERGNSNQQFTQDLFVPSSGKRKRDDSSGHYQNGGSIPQQDGAGDAIPEANFECDAFRITSIGDRKVPRDFFSSSSKIPQVDGPMPDPYDEMLSTPNIYSYQGPSEEFNEARTPAPNEIQTSTPVAVQNDIIEDDEELLNEDDDDDELDDLESGEDMNTQHLVLAQFDKVTRTKSRWKCSLKDGIMHINDKDILFNKAAGEFDF

SEQ ID NO: 31990 - protein, 328 aa, Arabidopsis thaliana
  misc_feature (1)..(328): Ceres Seq. ID no. 13591889
MMQAGVLNGPIERSSAQKPTPGGPLTHDLNVPYEGTEEYETPTAEMLFPPTPLQTPLPTPLPGTADNSSMYNIPTGSSDYPTPGTENGVNIDVKARPSPYMPPPSPWTNPRLDVNVAYVDGRDEPERGNSNQQFTQDLFVPSSGKRKRDDSSGHYQNGGSIPQQDGAGDAIPEANFECDAFRITSIGDRKVPRDFFSSSSKIPQVDGPMPDPYDEMLSTPNIYSYQGPSEEFNEARTPAPNEIQTSTPVAVQNDIIEDDEELLNEDDDDDELDDLESGEDMNTQHLVLAQFDKVTRTKSRWKCSLKDGIMHINDKDILFNKAAGEFDF

SEQ ID NO: 31991 - protein, 327 aa, Arabidopsis thaliana
  misc_feature (1)..(327): Ceres Seq. ID no. 13591890
MQAGVLNGPIERSSAQKPTPGGPLTHDLNVPYEGTEEYETPTAEMLFPPTPLQTPLPTPLPGTADNSSMYNIPTGSSDYPTPGTENGVNIDVKARPSPYMPPPSPWTNPRLDVNVAYVDGRDEPERGNSNQQFTQDLFVPSSGKRKRDDSSGHYQNGGSIPQQDGAGDAIPEANFECDAFRITSIGDRKVPRDFFSSSSKIPQVDGPMPDPYDEMLSTPNIYSYQGPSEEFNEARTPAPNEIQTSTPVAVQNDIIEDDEELLNEDDDDDELDDLESGEDMNTQHLVLAQFDKVTRTKSRWKCSLKDGIMHINDKDILFNKAAGEFDF

SEQ ID NO: 31992 - DNA, 1266 bp, Arabidopsis thaliana
  misc_feature (1)..(1266): Ceres Seq. ID no. 13591891
ggccgtctctcttcaacctcttcccctccactttgcttctctctctcctccccgggggttttacagtcatatcatcgtcggagactctgcgattcttcacggaatcgtatttctctctcagcgatttttttcgattctcgaagctgcaaggaccacccatcaaacattgaaactcaagcgggagaaattttctggctcgggagggaaactatggagccctaatgcccattttctgctgtctatgagggttgttgggatatcgattaacggcccctatcgaaaaaaataagggttgttattattttcatttcgcttcatgttcaaggttatgtttggatgatagatacattttgactttctcatacaatgagtacacgaagaaatggcatttccaagcatcagcgaggtgataaattttgtggtgaagggccaaactggatactaattgcagggggtgcattgttgagcacattgtccattcgctttggatacaagctaaagcagtcgcttgattcgaaacctcaatcaaatggctctgctggattaaaacgaactgagagtgtggaaggaaaagaggtgacaagcgagcaaatgatatccgcatctgacacttcactgcctcttgtgacagttcctgctccatcgagcaaagagaatggagtcatgtgggcaacttctcctgatcgcctggaacttcccccaagaccatacaatcacaattcaaactgctcagattctccttgcgtatctgaaaccagctcagacattttcagcaaacgagaagtaatacagaaactaaggcagcagctgaagagacgggatgacatgatacaggaaatgcaagaacagattctagagctgcaaaactcgtataacgcacagacggcacactcaagccatctccaggcacagctagacacactgaacagagatctgtttgaatcagaaagagaagttcaaagactgagaaaggcaattgctgatcacagcgtgggatgtggcgcggacagcaatggcaagacatctccggttggaccttggaatggcgggtttatggacagcgaaagcaattatgagtcacaagaaaagagcctaagggatggagaaagagtagagatgttgagaaaggaagtgagtgagcttaaagaagtgatagatgggaaagagtatctacttagaagctataaggagcagaagattgagctttcgcagaaggtaaaagagttgcagcagagactggactcacagctccaaaacttattgtag

SEQ ID NO: 31993 - protein, 299 aa, Arabidopsis thaliana
  misc_feature (1)..(299): Ceres Seq. ID no. 13591892
MSTRRNGISKHQRGDKFCGEGPNWILIAGGALLSTLSIRFGYKLKQSLDSKPQSNGSAGLKRTESVEGKEVTSEQMISASDTSLPLVTVPAPSSKENGVMWATSPDRLELPPRPYNHNSNCSDSPCVSETSSDIFSKREVIQKLRQQLKRRDDMIQEMQEQILELQNSYNAQTAHSSHLQAQLDTLNRDLFESEREVQRLRKAIADHSVGCGADSNGKTSPVGPWNGGFMDSESNYESQEKSLRDGERVEMLRKEVSELKEVIDGKEYLLRSYKEQKIELSQKVKELQQRLDSQLQNLL

SEQ ID NO: 31994 - protein, 224 aa, Arabidopsis thaliana
  misc_feature (1)..(224): Ceres Seq. ID no. 13591893
MISASDTSLPLVTVPAPSSKENGVMWATSPDRLELPPRPYNHNSNCSDSPCVSETSSDIFSKREVIQKLRQQLKRRDDMIQEMQEQILELQNSYNAQTAHSSHLQAQLDTLNRDLFESEREVQRLRKAIADHSVGCGADSNGKTSPVGPWNGGFMDSESNYESQEKSLRDGERVEMLRKEVSELKEVIDGKEYLLRSYKEQKIELSQKVKELQQRLDSQLQNLL

SEQ ID NO: 31995 - protein, 200 aa, Arabidopsis thaliana
  misc_feature (1)..(200): Ceres Seq. ID no. 13591894
MWATSPDRLELPPRPYNHNSNCSDSPCVSETSSDIFSKREVIQKLRQQLKRRDDMIQEMQEQILELQNSYNAQTAHSSHLQAQLDTLNRDLFESEREVQRLRKAIADHSVGCGADSNGKTSPVGPWNGGFMDSESNYESQEKSLRDGERVEMLRKEVSELKEVIDGKEYLLRSYKEQKIELSQKVKELQQRLDSQLQNLL

SEQ ID NO: 31996 - DNA, 1219 bp, Arabidopsis thaliana
  misc_feature (1)..(1219): Ceres Seq. ID no. 13591899
aaaacattattgtcaaaaataagaaagaaagaaaaaaatatgggtatccaagaaactgacccgttaacgcaattgagtttaccaccgggtttccgattttacccgaccgatgaagagcttatggttcaatatctctgtagaaaagcagctggttacgatttctctcttcagctcatcgccgaaatagatctttacaaattcgatccatgggttttaccaaataaagcattatttggagaaaaagaatggtatttttttagtcctagggatagaaaatatccaaacgggtcaagacctaaccgggttgccggatcgggttattggaaagctacgggtacggataaaataatctcgacggaaggacaaagagttggtattaaaaaagctttggtgttttacatcggaaaagctcctaaaggtactaaaaccaattggatcatgcatgagtatcgtctcattgaaccttctcgtagaaacggaagcactaagttggatgattgggttctatgtcgaatatacaagaagcaatcaagtgcacaaaaacaagtttacgataatggaatcgcgaatgctagagaattcagcaacaacggtacttcgtccacgacgtcgtcttcttctcactttgaagacgttcttgattcgtttcatcaagagatcgacaacagaaatttccagttttctaacccaaaccgcatctcgtcgctcagaccggacttaaccgaacagaaaaccgggttccacggtcttgcggatacttctaacttcgattgggctagttttgccggtaatgttgagcataataactcggtaccggaactcggaatgagtcatgttgttcctaatctcgagtacaactgtggctacctgaagacggaggaggaagtcgagagcagtcacgggtttaataactcgggcgagttagctcaaaagggttatggtgttgactcgtttgggtattcggggcaagttggtgggtttgggtttatgtgatgatgaaatgctgacgcaataaaaataagtcgttaatttttgtcccgtggcaaatcttatatgtatttgaatttcaattcttttgggttaagagggagactcatagatttagatgtagatttgtaatctttcatgcatagaaaatttgacgaatagatttcgtaactttattttgttgctgtttggttatctttgtattggtataaatttagtggattgaaattgc

SEQ ID NO: 31997 - protein, 330 aa, Arabidopsis thaliana
  misc_feature (1)..(330): Ceres Seq. ID no. 13591900
KTLLSKIRKKEKNMGIQETDPLTQLSLPPGFRFYPTDEELMVQYLCRKAAGYDFSLQLIAEIDLYKFDPWVLPNKALFGEKEWYFFSPRDRKYPNGSRPNRVAGSGYWKATGTDKIISTEGQRVGIKKALVFYIGKAPKGTKTNWIMHEYRLIEPSRRNGSTKLDDWVLCRIYKKQSSAQKQVYDNGIANAREFSNNGTSSTTSSSSHFEDVLDSFHQEIDNRNFQFSNPNRISSLRPDLTEQKTGFHGLADTSNFDWASFAGNVEHNNSVPELGMSHVVPNLEYNCGYLKTEEEVESSHGFNNSGELAQKGYGVDSFGYSGQVGGFGFM

SEQ ID NO: 31998 - protein, 317 aa, Arabidopsis thaliana
  misc_feature (1)..(317): Ceres Seq. ID no. 13591901
MGIQETDPLTQLSLPPGFRFYPTDEELMVQYLCRKAAGYDFSLQLIAEIDLYKFDPWVLPNKALFGEKEWYFFSPRDRKYPNGSRPNRVAGSGYWKATGTDKIISTEGQRVGIKKALVFYIGKAPKGTKTNWIMHEYRLIEPSRRNGSTKLDDWVLCRIYKKQSSAQKQVYDNGIANAREFSNNGTSSTTSSSSHFEDVLDSFHQEIDNRNFQFSNPNRISSLRPDLTEQKTGFHGLADTSNFDWASFAGNVEHNNSVPELGMSHVVPNLEYNCGYLKTEEEVESSHGFNNSGELAQKGYGVDSFGYSGQVGGFGFM

SEQ ID NO: 31999 - protein, 290 aa, Arabidopsis thaliana
  misc_feature (1)..(290): Ceres Seq. ID no. 13591902
MVQYLCRKAAGYDFSLQLIAEIDLYKFDPWVLPNKALFGEKEWYFFSPRDRKYPNGSRPNRVAGSGYWKATGTDKIISTEGQRVGIKKALVFYIGKAPKGTKTNWIMHEYRLIEPSRRNGSTKLDDWVLCRIYKKQSSAQKQVYDNGIANAREFSNNGTSSTTSSSSHFEDVLDSFHQEIDNRNFQFSNPNRISSLRPDLTEQKTGFHGLADTSNFDWASFAGNVEHNNSVPELGMSHVVPNLEYNCGYLKTEEEVESSHGFNNSGELAQKGYGVDSFGYSGQVGGFGFM

SEQ ID NO: 32000 - DNA, 2185 bp, Arabidopsis thaliana
  misc_feature (1)..(2185): Ceres Seq. ID no. 13591907
agattccggtgagaaacgagcaggtcctgtcttcttaagaactcaatttcttcatttctgattctataaaacatccttaaaaacatgtctaccacattgttgagaacaattcagctaaaccagttctcacttctcggaactagcttgttaagaaggagaaggagtaacaacttctccgtgaggtcttgtggaagccaaacaacgacgacccatgaagctaaacagtcttctccaacaagggttgctccaaaaaaccacaaaagcaaccaacttgataagattctgagagattacgaagctgtaattgggatagagactcatgttcagctctctacattgacaaaagccttttgtagttgctctaacaattacgtttcttatccaaacacaagtatttgtcctgtttgtatgggtttgcctggtgctttgcctgttttgaattccaaagttgttgaatttggtgttagattgggtttagctttgaattgtgatttgtctcttaagtctaaattcgataggaagcagtatttttatccagatcttcctaaaggttatcagatttctcagtttgatattcctattgcatctggtggttatgtggatgtggatattcctcttgagtttggtggtggacataggagatttggtattactagggttcatatggaagaagatgctggcaagttacttcattcagacacagtagattactctcaggtagatttgaatagagcaggtgttcctttacttgagattgtttctgaacctgatatgagaagtggtatagaagctgctgaatacgcttgtgaaatgcaacggattgcgaggtatttgggagtcagtaatgggaatatgcaagaaggctctcttcgctgcgatgtcaatatctcaatccgtcctattgggcaagctgagtttggcaccaaggtagaaataaagaatttgaacgcgttttcagcaattagcagagcaatagactttgagatatcaagacaagcacttctctataatcaggggaaagcagaccagattgtaacggagactcggctatgggaagaaggcgctcagaaaacagtaacaatgaggaaaaaggaagggcttgctgattaccgctactttccagaaccagatcttccagaagttatccttacccaagaatatgttgatagcattcgtgcttctttaccggaactccctgaagcaaagcgcaggagatatgaggcgatgggtctaggcatgcaagatgtgcttttcctcgcgaatgacgtcagtgttgcagaatatttcgatgcagtcattggtaagggtgctgaagtgaagttggcagcaaattggataatgagtgatattgcagctatcagttcagccaactcttggggagtgagtttaatatcattgatagaaagtttctcatttttcaagtaagcagcaatatcatcactttcacaatcttcttcatcgatttctctcttccaaatctcccaaaagatgtcgaaccctagagttttcttcgacatgagtctcagcggtactcccatcggacggatcgagatggagcttttcgctgatacaaccccaaacacggcggagaatttccgtgctctctgtaccggcgagaaaggaatgggaaagctaggtaagccacttcacttcaaaggatcgatcttccaccgtgtgattcccggattcatgtgtcaaggaggtgatttcaccgccaagaacggaaccggtggtgaatcgatctacggtgctaagttcaaggacgagaactttatcaagaagcatacaggagctgggattctctcaatggctaactctggtcctaacactaacggatctcagttcttcatctgtaccgataagacgtcgtggttagatggtaagcacgttgtgtttggacaagttgttaaaggcttggacgtcgtgaaggcgattgagaaagttggatctgattctggaaagacttccaaagtcgttaccatcactgattgtggtcagctttcttagatctgagtgagaaagtgagagactttgatctttatgagtaataatggtgtcttttgctttcggttgttcttcctcttaccttaatggattattctgtttagggtttgagttttcgtttcagagtttgtaacaaaacccttttgtgttttctggggtttgaaataattatgagcttacc

SEQ ID NO: 32001 - protein, 446 aa, Arabidopsis thaliana
  misc_feature (1)..(446): Ceres Seq. ID no. 13591908
MSTTLLRTIQLNQFSLLGTSLLRRRRSNNFSVRSCGSQTTTTHEAKQSSPTRVAPKNHKSNQLDKILRDYEAVIGIETHVQLSTLTKAFCSCSNNYVSYPNTSICPVCMGLPGALPVLNSKVVEFGVRLGLALNCDLSLKSKFDRKQYFYPDLPKGYQISQFDIPIASGGYVDVDIPLEFGGGHRRFGITRVHMEEDAGKLLHSDTVDYSQVDLNRAGVPLLEIVSEPDMRSGIEAAEYACEMQRIARYLGVSNGNMQEGSLRCDVNISIRPIGQAEFGTKVEIKNLNAFSAISRAIDFEISRQALLYNQGKADQIVTETRLWEEGAQKTVTMRKKEGLADYRYFPEPDLPEVILTQEYVDSIRASLPELPEAKRRRYEAMGLGMQDVLFLANDVSVAEYFDAVIGKGAEVKLAANWIMSDIAAISSANSWGVSLISLIESFSFFK

SEQ ID NO: 32002 - protein, 338 aa, Arabidopsis thaliana
  misc_feature (1)..(338): Ceres Seq. ID no. 13591909
MGLPGALPVLNSKVVEFGVRLGLALNCDLSLKSKFDRKQYFYPDLPKGYQISQFDIPIASGGYVDVDIPLEFGGGHRRFGITRVHMEEDAGKLLHSDTVDYSQVDLNRAGVPLLEIVSEPDMRSGIEAAEYACEMQRIARYLGVSNGNMQEGSLRCDVNISIRPIGQAEFGTKVEIKNLNAFSAISRAIDFEISRQALLYNQGKADQIVTETRLWEEGAQKTVTMRKKEGLADYRYFPEPDLPEVILTQEYVDSIRASLPELPEAKRRRYEAMGLGMQDVLFLANDVSVAEYFDAVIGKGAEVKLAANWIMSDIAAISSANSWGVSLISLIESFSFFK

SEQ ID NO: 32003 - protein, 253 aa, Arabidopsis thaliana
  misc_feature (1)..(253): Ceres Seq. ID no. 13591910
MEEDAGKLLHSDTVDYSQVDLNRAGVPLLEIVSEPDMRSGIEAAEYACEMQRIARYLGVSNGNMQEGSLRCDVNISIRPIGQAEFGTKVEIKNLNAFSAISRAIDFEISRQALLYNQGKADQIVTETRLWEEGAQKTVTMRKKEGLADYRYFPEPDLPEVILTQEYVDSIRASLPELPEAKRRRYEAMGLGMQDVLFLANDVSVAEYFDAVIGKGAEVKLAANWIMSDIAAISSANSWGVSLISLIESFSFFK

SEQ ID NO: 32004 - DNA, 2089 bp, Arabidopsis thaliana
  misc_feature (1)..(2089): Ceres Seq. ID no. 13591931
gaatttaacttttaaattccttccaccatcgaatcacaatctctctctctctcgcttgctgttactcgctttttcccagaaccggcttcgatttttctaaagcagccgaaatttacgattcccagaattttccctactgacaaaatttcacttcaaatacaaatctcgtcttcatgagtcttcttcttcgtccaaattgaattttctccgcacacgagagttgaattttgattttcggctgtttatatggtctccggtcccttagggttttaattcttctgcagatctctcacgatgagcgttgcgaaatcccaagtatggcagccatgcaagaagaagaggtcctcctcctgattcaatagagatctatctatatatatataagagaccgagatatatatatagagagagagatggcttctcgaacaacgccttcacgatcgactccttcacgatcaacgccttctggtagttcttctggtggtaggacacgagttggtaagtatgagcttggacgaactttgggtgaaggaactttcgctaaggtcaaattcgctagaaatgttgagaatggtgataatgtcgctattaaggttattgataaagagaaagttctgaaaaataagatgatcgctcagatcaagcgtgagatttcgacgatgaaattgatcaagcacccgaatgtcattcgtatgtttgaggtgatggctagcaaaactaagatctacttcgttttggaattcgtcactggtggggagcttttcgataaaatttcaagcaatgggagattgaaggaagatgaggcgaggaagtatttccaacagctgattaatgcggttgattattgtcatagcaggggagtttatcatagagaccttaagccagaaaatttgcttttggatgctaatggtgctttgaaagtgtctgactttggattgagcgctctacctcagcaagttcgagaggatgggttacttcacacaacctgtggaacacccaattatgttgctccggaggtaatcaacaacaaaggttatgatggagcgaaggctgatttgtggtcttgtggagtaattctctttgttttaatggctggttatttaccttttgaagattctaacctgacgtcgttatataaaaagatattcaaagcagaatttacttgccctccctggttctctgcaagtgctaagaagttaatcaaaagaattctggatcccaatccagcaacgaggattacatttgctgaggtcattgaaaatgagtggtttaaaaaagggtataaagcacctaaatttgagaatgctgatgtcagccttgatgatgttgatgcaatctttgatgactcaggggagtctaagaatcttgttgtggagaggcgagaagaaggactcaaaacaccagtaacgatgaatgcttttgagctcatctcgacatcccagggtctcaatctcggttcacttttcgaaaaacaaatggggctggtgaaacgaaaaactcgatttacttccaaatcttcggctaatgagatagttacaaaaattgaggctgcggcagcacctatggggtttgatgtcaagacaaataactacaagatgaagctgacaggagagaaatcaggccgcaagggtcagttggcagttgccactgaggtttttcaagttgctccatctctttacatggttgaaatgcgaaaatcagggggtgacacattggaattccacaagttttacaagaaccttaccacgggacttaaggacattgtttggaaaaccatcgacgaagagaaagaggaaggaaccgatggtggtggtactaatggtgccatggctaaccggacaattgcaaaacagtcgacataagctgtttacttttttctaatatagattttgttcgttataaattactatagtagtacggagtggttttgaagttaatacaaaaggaagcgtcaagaagtggagcagaagcagtttgaaactatattggggaatggggattattgatattttaatcatgtttgattccatggaatgttgtgaatagcatatgcgtgttgcgaggttcttggcttgaatcgattaaccgg

SEQ ID NO: 32005 - protein, 482 aa, Arabidopsis thaliana
  misc_feature (1)..(482): Ceres Seq. ID no. 13591932
MASRTTPSRSTPSRSTPSGSSSGGRTRVGKYELGRTLGEGTFAKVKFARNVENGDNVAIKVIDKEKVLKNKMIAQIKREISTMKLIKHPNVIRMFEVMASKTKIYFVLEFVTGGELFDKISSNGRLKEDEARKYFQQLINAVDYCHSRGVYHRDLKPENLLLDANGALKVSDFGLSALPQQVREDGLLHTTCGTPNYVAPEVINNKGYDGAKADLWSCGVILFVLMAGYLPFEDSNLTSLYKKIFKAEFTCPPWFSASAKKLIKRILDPNPATRITFAEVIENEWFKKGYKAPKFENADVSLDDVDAIFDDSGESKNLVVERREEGLKTPVTMNAFELISTSQGLNLGSLFEKQMGLVKRKTRFTSKSSANEIVTKIEAAAAPMGFDVKTNNYKMKLTGEKSGRKGQLAVATEVFQVAPSLYMVEMRKSGGDTLEFHKFYKNLTTGLKDIVWKTIDEEKEEGTDGGGTNGAMANRTIAKQST

SEQ ID NO: 32006 - protein, 411 aa, Arabidopsis thaliana
  misc_feature (1)..(411): Ceres Seq. ID no. 13591933
MIAQIKREISTMKLIKHPNVIRMFEVMASKTKIYFVLEFVTGGELFDKISSNGRLKEDEARKYFQQLINAVDYCHSRGVYHRDLKPENLLLDANGALKVSDFGLSALPQQVREDGLLHTTCGTPNYVAPEVINNKGYDGAKADLWSCGVILFVLMAGYLPFEDSNLTSLYKKIFKAEFTCPPWFSASAKKLIKRILDPNPATRITFAEVIENEWFKKGYKAPKFENADVSLDDVDAIFDDSGESKNLVVERREEGLKTPVTMNAFELISTSQGLNLGSLFEKQMGLVKRKTRFTSKSSANEIVTKIEAAAAPMGFDVKTNNYKMKLTGEKSGRKGQLAVATEVFQVAPSLYMVEMRKSGGDTLEFHKFYKNLTTGLKDIVWKTIDEEKEEGTDGGGTNGAMANRTIAKQST

SEQ ID NO: 32007 - protein, 400 aa, Arabidopsis thaliana
  misc_feature (1)..(400): Ceres Seq. ID no. 13591934
MKLIKHPNVIRMFEVMASKTKIYFVLEFVTGGELFDKISSNGRLKEDEARKYFQQLINAVDYCHSRGVYHRDLKPENLLLDANGALKVSDFGLSALPQQVREDGLLHTTCGTPNYVAPEVINNKGYDGAKADLWSCGVILFVLMAGYLPFEDSNLTSLYKKIFKAEFTCPPWFSASAKKLIKRILDPNPATRITFAEVIENEWFKKGYKAPKFENADVSLDDVDAIFDDSGESKNLVVERREEGLKTPVTMNAFELISTSQGLNLGSLFEKQMGLVKRKTRFTSKSSANEIVTKIEAAAAPMGFDVKTNNYKMKLTGEKSGRKGQLAVATEVFQVAPSLYMVEMRKSGGDTLEFHKFYKNLTTGLKDIVWKTIDEEKEEGTDGGGTNGAMANRTIAKQST

SEQ ID NO: 32008 - DNA, 860 bp, Arabidopsis thaliana
  misc_feature (1)..(860): Ceres Seq. ID no. 13591956
aagagtagggaaaaagaaaagaaaagtagagtactatcttcctcttaaaccaaccattcaaaatgttgcgtactatcttcctcttatctcttctctttgctctatccaatgcctctgttcaagatttctgtgtcgcaaacctgaaacgcgctgaaacccctgcgggttacccttgcattcgtcccattcatgtcaaagctacagactttgtcttctctggcttaggcactcctggaaacactacaaacatcatcaacgccgctgtcacacccgctttcgcagctcagttcccgggtctgaacggtctaggcctctctacagctagacttgacttagctcctaaaggtgtgatcccaatgcacactcaccctggtgcctctgaggttctctttgtccttactggctccattaccgctgggtttgtctcctcggcaaacgctgtctacgtgcagacactcaaaccaggacaggtcatggttttcccacagggcttgcttcatttccagatcaacgcgggaaaatcctctgcttcagccgttgtcactttcaacagcgctaatccgggtctgcagattctcgacttcgcactctttgctaacagtcttcccactgaactcgtcgtgggtactactttccttgacgccactacagtcaagaagctaaagggtgttcttggaggaactggctaaaaaaagacttaggactactccttgactaaaacaccaaaacctgtttcttcatctttttttctctttaattgattcttgtcttctctgttttgtgtgccttgtaattcttcaaaacctgtcaaaattgttacattgtatgtgagttttttcaattaagatcctgagttggtc

SEQ ID NO: 32009 - protein, 208 aa, Arabidopsis thaliana
  misc_feature (1)..(208): Ceres Seq. ID no. 13591957
MLRTIFLLSLLFALSNASVQDFCVANLKRAETPAGYPCIRPIHVKATDFVFSGLGTPGNTTNIINAAVTPAFAAQFPGLNGLGLSTARLDLAPKGVIPMHTHPGASEVLFVLTGSITAGFVSSANAVYVQTLKPGQVMVFPQGLLHFQINAGKSSASAVVTFNSANPGLQILDFALFANSLPTELVVGTTFLDATTVKKLKGVLGGTG

SEQ ID NO: 32010 - protein, 110 aa, Arabidopsis thaliana
  misc_feature (1)..(110): Ceres Seq. ID no. 13591958
MHTHPGASEVLFVLTGSITAGFVSSANAVYVQTLKPGQVMVFPQGLLHFQINAGKSSASAVVTFNSANPGLQILDFALFANSLPTELVVGTTFLDATTVKKLKGVLGGTG

SEQ ID NO: 32011 - DNA, 3371 bp, Arabidopsis thaliana
  misc_feature (1)..(3371): Ceres Seq. ID no. 13591959
atccggaaccaaagaaagaaactgtgtggtttcatgatggcacctttggtttctcttcttcattgaagggtcgaatttggtctgagaaaagaagagtggagagagagaaagagaagaggcaagagccccacaagagagacatgcttgtctgtgtagtccctattttgtatgttctttaatctctcccactctgtttttgtcatgtgtaagggttttgtccttcgattttggagtcttctttaaccaaaaaaaaacagattccatgaaatggctttgtctttaattcctctggtttgtcctggatttatcttcttgtagcctctttgctcaatagagctctttttgtctcttcttgtattaaataaaataaaatgaagacttagtaaagaaaaagaaaaactcttgagtcttgctaaagcctagttagtgttgagtgtgggagagacaaaacagaacattgaaaaatctctctgtatgatggcttcattgtcttgtgttgaagacaagatgaaaacaagttgtttggttaatggtggaggaactataacaacaacaacatctcaatctaccttgcttgaagagatgaagctgttgaaagaccagtcaggtacaagaaagccggtaataaactcggagctatggcacgcttgtgcaggccctttggtgtgtctccctcaagttgggagcttagtgtattacttctcacaaggtcatagcgagcaggttgctgtttcaaccagaagatcagcaacaacacaagttcctaattatccgaaccttccatctcagttgatgtgtcaagtccataatgttactcttcatgctgacaaagacagtgacgaaatctatgctcagatgagtcttcaacctgttcactctgagagagatgtgttccctgtaccagactttggaatgctgagaggaagtaagcacccgactgagtttttctgcaaaacacttactgcaagtgacacaagcacacatggaggtttctcagtgccacgtagagctgcagagaagctatttccaccattggactactcagcacagccgccaacgcaagagcttgtagttcgagatcttcatgagaatacttggacatttcgccatatctaccgagggcaaccaaagagacatctcctaactacaggatggagtttgttcgttggatcgaagagattgagagctggggattctgttttgttcatcagggatgagaagtcacaacttatggtcggtgttaggcgtgccaatcgccaacaaacagcacttccttcatcagttctctcagcggatagtatgcacatcggtgttcttgctgctgctgctcacgcaaccgccaaccgtactccttttttgatattctataatccaagagcttgtccagcagagttcgtgatccctctagctaagtaccgtaaggcgatatgcgggtctcagctctcagttggtatgagatttggaatgatgtttgaaactgaagattccgggaaacgaaggtacatgggaactattgttggaatcagcgatttggatccgttgagatggcctggttctaagtggcgtaaccttcaggtagaatgggatgagcctggatgtaatgataaacctactcgggtcagtccatgggatatcgaaacacctgaaagtctcttcatttttccttctctgacctcaggactcaaacgtcagctccatccatcttactttgctggtgaaactgaatggggtagcttgataaaacggccacttatacgtgttcctgattccgcgaatgggattatgccatatgcatctttccctagtatggcttcggagcagcttatgaaaatgatgatgaggcctcacaacaaccaaaatgtaccatctttcatgtctgagatgcagcagaatattgtaatggggaatggaggtttgctaggagatatgaagatgcagcaacccctgatgatgaaccagaaatctgagatggtgcagccacaaaacaagctaacagtgaacccatctgcttctaatacgagtggccaagaacagaatctttcacagagtatgagtgctcctgctaaacctgagaactctacactctctggttgcagctctggtagagtccaacatggacttgagcagtcaatggaacaggcaagccaggttactacatccacagtgtgtaatgaggaaaaggttaatcagctacttcagaaaccgggtgcttcgtcgcctgtacaagctgatcaatgtcttgacattactcatcagatttaccaaccacagtctgatccaataaatggattctctttcctggaaactgatgagctgacatcacaagtctcttccttccagtctcttgccggatcatacaagcaaccattcattctatcctcccaggattcttcagctgttgtgttaccggattccacaaactcaccgctgtttcatgatgtgtgggacactcagttgaacggtctcaagtttgaccagttcagtcccttgatgcagcaggacctttatgctagtcagaatatctgtatgagtaatagcacaaccagtaacattctagatcctccactctcaaacacagtccttgatgacttctgtgccatcaaagacactgatttccagaaccacccttctggttgtttggttggaaacaacaacactagctttgctcaagatgtccagtcgcagatcacatcagctagctttgcagactcacaggccttctctcgccaagattttccagataattctggaggcactggtacatcttcaagcaatgttgattttgatgattgtagtctgcggcaaaatagtaaaggctcatcatggcagaaaattgcgacaccccgcgtccgaacctacactaaggttcaaaaaaccgggtcagtcgggagatcaattgatgtcacaagctttaaagactacgaggagctaaaatctgctatcgaatgcatgtttggattggaaggactactaactcacccacaaagctcgggttggaagcttgtatatgttgattatgagagtgatgttctgcttgtaggagatgatccatgggaagagtttgtgggatgcgtaaggtgcataaggatattgtcgccaactgaggtccagcagatgagtgaagaagggatgaagcttttgaacagcgcaggcattaacgatcttaagacttctgtttcataaatgtaacaatataaaaatgatctcatgctgatttgtaagaaaaaaaagagagtaagaaatgttcttttctccaactggtagaggagaaaccatcttgttgtaagcatttgatgtgttgttccgatttgagacctgaaactatattcatattatgtagtagagtgatgaatgaatcagtagttgagact

SEQ ID NO: 32012 - protein, 902 aa, Arabidopsis thaliana
  misc_feature (1)..(902): Ceres Seq. ID no. 13591960
MMASLSCVEDKMKTSCLVNGGGTITTTTSQSTLLEEMKLLKDQSGTRKPVINSELWHACAGPLVCLPQVGSLVYYFSQGHSEQVAVSTRRSATTQVPNYPNLPSQLMCQVHNVTLHADKDSDEIYAQMSLQPVHSERDVFPVPDFGMLRGSKHPTEFFCKTLTASDTSTHGGFSVPRRAAEKLFPPLDYSAQPPTQELVVRDLHENTWTFRHIYRGQPKRHLLTTGWSLFVGSKRLRAGDSVLFIRDEKSQLMVGVRRANRQQTALPSSVLSADSMHIGVLAAAAHATANRTPFLIFYNPRACPAEFVIPLAKYRKAICGSQLSVGMRFGMMFETEDSGKRRYMGTIVGISDLDPLRWPGSKWRNLQVEWDEPGCNDKPTRVSPWDIETPESLFIFPSLTSGLKRQLHPSYFAGETEWGSLIKRPLIRVPDSANGIMPYASFPSMASEQLMKMMMRPHNNQNVPSFMSEMQQNIVMGNGGLLGDMKMQQPLMMNQKSEMVQPQNKLTVNPSASNTSGQEQNLSQSMSAPAKPENSTLSGCSSGRVQHGLEQSMEQASQVTTSTVCNEEKVNQLLQKPGASSPVQADQCLDITHQIYQPQSDPINGFSFLETDELTSQVSSFQSLAGSYKQPFILSSQDSSAVVLPDSTNSPLFHDVWDTQLNGLKFDQFSPLMQQDLYASQNICMSNSTTSNILDPPLSNTVLDDFCAIKDTDFQNHPSGCLVGNNNTSFAQDVQSQITSASFADSQAFSRQDFPDNSGGTGTSSSNVDFDDCSLRQNSKGSSWQKIATPRVRTYTKVQKTGSVGRSIDVTSFKDYEELKSAIECMFGLEGLLTHPQSSGWKLVYVDYESDVLLVGDDPWEEFVGCVRCIRILSPTEVQQMSEEGMKLLNSAGINDLKTSVS

SEQ ID NO: 32013 - protein, 901 aa, Arabidopsis thaliana
  misc_feature (1)..(901): Ceres Seq. ID no. 13591961
MASLSCVEDKMKTSCLVNGGGTITTTTSQSTLLEEMKLLKDQSGTRKPVINSELWHACAGPLVCLPQVGSLVYYFSQGHSEQVAVSTRRSATTQVPNYPNLPSQLMCQVHNVTLHADKDSDEIYAQMSLQPVHSERDVFPVPDFGMLRGSKHPTEFFCKTLTASDTSTHGGFSVPRRAAEKLFPPLDYSAQPPTQELVVRDLHENTWTFRHIYRGQPKRHLLTTGWSLFVGSKRLRAGDSVLFIRDEKSQLMVGVRRANRQQTALPSSVLSADSMHIGVLAAAAHATANRTPFLIFYNPRACPAEFVIPLAKYRKAICGSQLSVGMRFGMMFETEDSGKRRYMGTIVGISDLDPLRWPGSKWRNLQVEWDEPGCNDKPTRVSPWDIETPESLFIFPSLTSGLKRQLHPSYFAGETEWGSLIKRPLIRVPDSANGIMPYASFPSMASEQLMKMMMRPHNNQNVPSFMSEMQQNIVMGNGGLLGDMKMQQPLMMNQKSEMVQPQNKLTVNPSASNTSGQEQNLSQSMSAPAKPENSTLSGCSSGRVQHGLEQSMEQASQVTTSTVCNEEKVNQLLQKPGASSPVQADQCLDITHQIYQPQSDPINGFSFLETDELTSQVSSFQSLAGSYKQPFILSSQDSSAVVLPDSTNSPLFHDVWDTQLNGLKFDQFSPLMQQDLYASQNICMSNSTTSNILDPPLSNTVLDDFCAIKDTDFQNHPSGCLVGNNNTSFAQDVQSQITSASFADSQAFSRQDFPDNSGGTGTSSSNVDFDDCSLRQNSKGSSWQKIATPRVRTYTKVQKTGSVGRSIDVTSFKDYEELKSAIECMFGLEGLLTHPQSSGWKLVYVDYESDVLLVGDDPWEEFVGCVRCIRILSPTEVQQMSEEGMKLLNSAGINDLKTSVS

SEQ ID NO: 32014 - protein, 891 aa, Arabidopsis thaliana
  misc_feature (1)..(891): Ceres Seq. ID no. 13591962
MKTSCLVNGGGTITTTTSQSTLLEEMKLLKDQSGTRKPVINSELWHACAGPLVCLPQVGSLVYYFSQGHSEQVAVSTRRSATTQVPNYPNLPSQLMCQVHNVTLHADKDSDEIYAQMSLQPVHSERDVFPVPDFGMLRGSKHPTEFFCKTLTASDTSTHGGFSVPRRAAEKLFPPLDYSAQPPTQELVVRDLHENTWTFRHIYRGQPKRHLLTTGWSLFVGSKRLRAGDSVLFIRDEKSQLMVGVRRANRQQTALPSSVLSADSMHIGVLAAAAHATANRTPFLIFYNPRACPAEFVIPLAKYRKAICGSQLSVGMRFGMMFETEDSGKRRYMGTIVGISDLDPLRWPGSKWRNLQVEWDEPGCNDKPTRVSPWDIETPESLFIFPSLTSGLKRQLHPSYFAGETEWGSLIKRPLIRVPDSANGIMPYASFPSMASEQLMKMMMRPHNNQNVPSFMSEMQQNIVMGNGGLLGDMKMQQPLMMNQKSEMVQPQNKLTVNPSASNTSGQEQNLSQSMSAPAKPENSTLSGCSSGRVQHGLEQSMEQASQVTTSTVCNEEKVNQLLQKPGASSPVQADQCLDITHQIYQPQSDPINGFSFLETDELTSQVSSFQSLAGSYKQPFILSSQDSSAVVLPDSTNSPLFHDVWDTQLNGLKFDQFSPLMQQDLYASQNICMSNSTTSNILDPPLSNTVLDDFCAIKDTDFQNHPSGCLVGNNNTSFAQDVQSQITSASFADSQAFSRQDFPDNSGGTGTSSSNVDFDDCSLRQNSKGSSWQKIATPRVRTYTKVQKTGSVGRSIDVTSFKDYEELKSAIECMFGLEGLLTHPQSSGWKLVYVDYESDVLLVGDDPWEEFVGCVRCIRILSPTEVQQMSEEGMKLLNSAGINDLKTSVS

SEQ ID NO: 32015 - DNA, 2073 bp, Arabidopsis thaliana
  misc_feature (1)..(2073): Ceres Seq. ID no. 13591980
gaaaggaaaacgctaaaaggttgcgcgagtggagagtctgcccgccaagcaacccctagtattcagctttttgtgcactgatccaactcgactcggcctttttctctgagttgactcgaccgagaaaaggcgatagagctggggtttaattcggcgataacaatggacgaagattccgtccatggcgattctcacctcaagacatgtgtcgtcctcggcggacgagggttcattggtcgatcgcttgtctccagattgcttcgtctcggaaactggacagtccgagtcgcagattccggtcacactctccatcttgatgaatccgattcgctcctcgaggatgctctctcctccggccgcgcttcttatcactgcgtcgatgttcgtgataaacctcagatcgttaaagttaccgagggttcctatgttgtattttacatgggagctactgatttacgttcccatgattactttgactgctacaaggttatagttcaaggtacaagaaatgtgatttctgcctgtcgtgaatctggagtcagaaaacttatctacaacagtacagctgatgttgtttttgatggttcccaacctatacgtgatggtgatgaatccttgagacgtcctttgaagttccaatctatgttgacagacttcaaagctcaagcagaagcgttgatcaaattggctaacaaccgagatggtctcttaacttgtgcacttcgctctagcattgtatttggacctggtgacacagagtttgtaccttttttggtgaatctagccaagtccggatatgcaaagtttatactcgggagtggtgaaaatatctctgatttcacttactcggagaacgtttctcatgcacatatttgcgccgttaaagcattagattcacagatggagtttgtggctggaaaggaattttttatcacaaacctcaagccggtcagattttgggactttgtaagccatatagttgaaggtctgggatacccaagaccatccattaaacttcctgttcggctggttttgtatgttttctcacttcttaagtggacacatgaaaaggagggccttgggagtaattatgacacagcacatcagtatgctctgttagcttcatcaacgagaacttttaactgcaatgcagctaagaagcatcttggttacacacctgttgtgacacttgaagatggtattgcatcaacgcttcaatggttctctcgggatcttgagaagtctgatgacacaatcattcaatctactgcagatcagcttcttggttgtgggaaagttgcagacatcttgctgtggagaaatgagaagaaaaccttcgtttcttttcttgtcctaaacttgttttattactggttcttcttttctggaaacacatttacttcatctgcagcccaacttctgtttatatttgctgttgctctctatggagtctcttttgtgccgtcaaagattttcgggtttcaagtcaacaaaatacccccatggagatttgagatctccgaatccgctgtgagagatcttagtagtgatatcgtagttgtctggaatcaaggagttcgcagttttaaatccttaagcagtggaggagactggatcaagttcttcaagattgcaggatcactgtatctcctcaaactgattgtatcccgttcattggcagcatttcttttcacagttatgtcgttctcattcaccggtttcttcatctacgagcaatacgagcttgagctctaccacctagcccggatattcgtcgaatgcttaacatttattaaaaggatggtgatacctgtttctgatgcttcatctaaaccaatgttcatgtgaagcttccaaagtcctccactaaacgaacaccaacaatcccagagactaattgcagttattagatgtcttatgtacaaacattatgctatcaggatgtaatcttcactgagaggggatggatatatgattatttacgaatttgccataactactatcaaaatgcaccgttttgatccggtttccaaaaaaaaaagaaaaaaaaggaaagtatccttatatatcctt

SEQ ID NO: 32016 - protein, 561 aa, Arabidopsis thaliana
  misc_feature (1)..(561): Ceres Seq. ID no. 13591981
MDEDSVHGDSHLKTCVVLGGRGFIGRSLVSRLLRLGNWTVRVADSGHTLHLDESDSLLEDALSSGRASYHCVDVRDKPQIVKVTEGSYVVFYMGATDLRSHDYFDCYKVIVQGTRNVISACRESGVRKLIYNSTADVVFDGSQPIRDGDESLRRPLKFQSMLTDFKAQAEALIKLANNRDGLLTCALRSSIVFGPGDTEFVPFLVNLAKSGYAKFILGSGENISDFTYSENVSHAHICAVKALDSQMEFVAGKEFFITNLKPVRFWDFVSHIVEGLGYPRPSIKLPVRLVLYVFSLLKWTHEKEGLGSNYDTAHQYALLASSTRTFNCNAAKKHLGYTPVVTLEDGIASTLQWFSRDLEKSDDTIIQSTADQLLGCGKVADILLWRNEKKTFVSFLVLNLFYYWFFFSGNTFTSSAAQLLFIFAVALYGVSFVPSKIFGFQVNKIPPWRFEISESAVRDLSSDIVVVWNQGVRSFKSLSSGGDWIKFFKIAGSLYLLKLIVSRSLAAFLFTVMSFSFTGFFIYEQYELELYHLARIFVECLTFIKRMVIPVSDASSKPMFM

SEQ ID NO: 32017 - protein, 469 aa, Arabidopsis thaliana
  misc_feature (1)..(469): Ceres Seq. ID no. 13591982
MGATDLRSHDYFDCYKVIVQGTRNVISACRESGVRKLIYNSTADVVFDGSQPIRDGDESLRRPLKFQSMLTDFKAQAEALIKLANNRDGLLTCALRSSIVFGPGDTEFVPFLVNLAKSGYAKFILGSGENISDFTYSENVSHAHICAVKALDSQMEFVAGKEFFITNLKPVRFWDFVSHIVEGLGYPRPSIKLPVRLVLYVFSLLKWTHEKEGLGSNYDTAHQYALLASSTRTFNCNAAKKHLGYTPVVTLEDGIASTLQWFSRDLEKSDDTIIQSTADQLLGCGKVADILLWRNEKKTFVSFLVLNLFYYWFFFSGNTFTSSAAQLLFIFAVALYGVSFVPSKIFGFQVNKIPPWRFEISESAVRDLSSDIVVVWNQGVRSFKSLSSGGDWIKFFKIAGSLYLLKLIVSRSLAAFLFTVMSFSFTGFFIYEQYELELYHLARIFVECLTFIKRMVIPVSDASSKPMFM

SEQ ID NO: 32018 - protein, 401 aa, Arabidopsis thaliana
  misc_feature (1)..(401): Ceres Seq. ID no. 13591983
MLTDFKAQAEALIKLANNRDGLLTCALRSSIVFGPGDTEFVPFLVNLAKSGYAKFILGSGENISDFTYSENVSHAHICAVKALDSQMEFVAGKEFFITNLKPVRFWDFVSHIVEGLGYPRPSIKLPVRLVLYVFSLLKWTHEKEGLGSNYDTAHQYALLASSTRTFNCNAAKKHLGYTPVVTLEDGIASTLQWFSRDLEKSDDTIIQSTADQLLGCGKVADILLWRNEKKTFVSFLVLNLFYYWFFFSGNTFTSSAAQLLFIFAVALYGVSFVPSKIFGFQVNKIPPWRFEISESAVRDLSSDIVVVWNQGVRSFKSLSSGGDWIKFFKIAGSLYLLKLIVSRSLAAFLFTVMSFSFTGFFIYEQYELELYHLARIFVECLTFIKRMVIPVSDASSKPMFM

SEQ ID NO: 32019 - DNA, 2317 bp, Arabidopsis thaliana
  misc_feature (1)..(2317): Ceres Seq. ID no. 13591984
gacgaaccggcacggattttactccttacttttctccactccagtctctctcttttctgcgnttcctcttctctctgtggcgtagagttatagagaggaatttaggtcttcttctttggtttttcctttgctcttcattctcatactctctcgacagtgaaatcaggaatttggtatggctgctactgcttctgcaattcgttacgctcctgaggatccgaatctccctaagccatggaaaggtcttgtggatagtagaactgggtacctctacttttggaatccagaaaccaatgttactcagtacgagagaccggcttcttccgctcctcccaagcttgctgctattcccgtaagctcttcggttcagactaatcagcaatcttcttctggatttaactctggcaaggaagatgataagtatggtaggggcagtgatgggcctaagtctgactctggatcaaggtttaatgaggctggaagaactggacctatatcttctaatgatgctgctagtggactagggaatgcttcatctggtggctcatctgccagagggcctccttcttcagccgcaggaaatgaattgtccccagaggcctattgccgcaaacatgaaattactgtcagtggaggccaagtaccaccacctctaatgtcttttgaagccactggtcttcccaatgagcttctgcgggagtgtcccaattttatgccatatgcgctctcttttgtcccaggtgcgatatttgctcttggaggagctaatgtcgtacgctgtgccacttctttggggttcttgcaaattatttggagtgccctttttggtggaccaaattttttgaggtgtcctcctgctgcaggtttcaacagctatcttgtgttgcctgcaaacgggaggatggtatacagtgcaggattctcagctccatctccaattcaagctcagtcatggccaattgcgatgcaaaacagagacatagtagccattgctaaaacaggctcgggaaaaactttgggttacttgattcctggtttcatgcatctccaacggatccacaatgattcacgaatgggcccaacgatcttggtcttgtcccctactagggagttggccacacaaatccaagttgaagctctgaaatttggcaagtcatctaaaatttcgtgtgcgtgtttgtatggtggagcacccaagggtcctcagctgaaggaaatagaaagaggtgtagatattgttgttgcaactcccgggcgactgaatgatatccttgaaatgaagagaatcagtctgcatcaagtatcttaccttgtgctggacgaggcagatagaatgctggacatggggttcgaacctcagatcagaaaaattgtgaatgaggttcccactaagcgtcaaaccctcatgtacactgcaacatggccaaaggaggtgaggaaaatcgcagctgatcttcttgttaaccctgcccaggtcaatattggtaatgttgatgagcttgtggcgaacaagtccattactcagactattgaagtcttagcaccgatggagaaacatagtaggttagagcagatattgcgctctcaggaaccgggttccaagattataattttctgttcaaccaaaaggatgtgtgatcaactggcaaggaacctgacccgtacgtttggagctgctgctatacatggagacaagtcgcaggctgagagagacgacgtactgaatcaatttagaagtggtaggactcctgttcttgttgcaactgatgtagctgctcgtggacttgacgttaaggacataagggtggtggtcaactatgattttccaaatggagtagaggattatgtccatagaattggaagaactggaagagctggagcaaccggtctagcttacaccttctttggagaccaagatgcaaaacatgcttcagatctgatcaagatcttggaaggagcaaaccagaaagttcctccacaggtccgcgaaatggctacacgtggtggtggtggaatgaacaaatttcgtcgctggggtacaccttccagtggtggtggtggcggccgtggtggctatggtgattctggttatggtggtcgtggtgagtctggctatggtagtcgtggtgattctggttatggtggtcgtggtgattctggtggtagaggaagctgggctccttcacgtgacagcagtggcagctcaggatggggaagagagagaagccgtagtcctgagagattcagaggaggtccaccgtccacttcatctccgcctcgcagctttcatgaggcgatgatgatgaaaaatagataa

SEQ ID NO: 32020 - protein, 713 aa, Arabidopsis thaliana
  misc_feature (1)..(713): Ceres Seq. ID no. 13591985
MAATASAIRYAPEDPNLPKPWKGLVDSRTGYLYFWNPETNVTQYERPASSAPPKLAAIPVSSSVQTNQQSSSGFNSGKEDDKYGRGSDGPKSDSGSRFNEAGRTGPISSNDAASGLGNASSGGSSARGPPSSAAGNELSPEAYCRKHEITVSGGQVPPPLMSFEATGLPNELLRECPNFMPYALSFVPGAIFALGGANVVRCATSLGFLQIIWSALFGGPNFLRCPPAAGFNSYLVLPANGRMVYSAGFSAPSPIQAQSWPIAMQNRDIVAIAKTGSGKTLGYLIPGFMHLQRIHNDSRMGPTILVLSPTRELATQIQVEALKFGKSSKISCACLYGGAPKGPQLKEIERGVDIVVATPGRLNDILEMKRISLHQVSYLVLDEADRMLDMGFEPQIRKIVNEVPTKRQTLMYTATWPKEVRKIAADLLVNPAQVNIGNVDELVANKSITQTIEVLAPMEKHSRLEQILRSQEPGSKIIIFCSTKRMCDQLARNLTRTFGAAAIHGDKSQAERDDVLNQFRSGRTPVLVATDVAARGLDVKDIRVVVNYDFPNGVEDYVHRIGRTGRAGATGLAYTFFGDQDAKHASDLIKILEGANQKVPPQVREMATRGGGGMNKFRRWGTPSSGGGGGRGGYGDSGYGGRGESGYGSRGDSGYGGRGDSGGRGSWAPSRDSSGSSGWGRERSRSPERFRGGPPSTSSPPRSFHEAMMMKNR

SEQ ID NO: 32021 - protein, 553 aa, Arabidopsis thaliana
  misc_feature (1)..(553): Ceres Seq. ID no. 13591986
MSFEATGLPNELLRECPNFMPYALSFVPGAIFALGGANVVRCATSLGFLQIIWSALFGGPNFLRCPPAAGFNSYLVLPANGRMVYSAGFSAPSPIQAQSWPIAMQNRDIVAIAKTGSGKTLGYLIPGFMHLQRIHNDSRMGPTILVLSPTRELATQIQVEALKFGKSSKISCACLYGGAPKGPQLKEIERGVDIVVATPGRLNDILEMKRISLHQVSYLVLDEADRMLDMGFEPQIRKIVNEVPTKRQTLMYTATWPKEVRKIAADLLVNPAQVNIGNVDELVANKSITQTIEVLAPMEKHSRLEQILRSQEPGSKIIIFCSTKRMCDQLARNLTRTFGAAAIHGDKSQAERDDVLNQFRSGRTPVLVATDVAARGLDVKDIRVVVNYDFPNGVEDYVHRIGRTGRAGATGLAYTFFGDQDAKHASDLIKILEGANQKVPPQVREMATRGGGGMNKFRRWGTPSSGGGGGRGGYGDSGYGGRGESGYGSRGDSGYGGRGDSGGRGSWAPSRDSSGSSGWGRERSRSPERFRGGPPSTSSPPRSFHEAMMMKNR

SEQ ID NO: 32022 - protein, 534 aa, Arabidopsis thaliana
  misc_feature (1)..(534): Ceres Seq. ID no. 13591987
MPYALSFVPGAIFALGGANVVRCATSLGFLQIIWSALFGGPNFLRCPPAAGFNSYLVLPANGRMVYSAGFSAPSPIQAQSWPIAMQNRDIVAIAKTGSGKTLGYLIPGFMHLQRIHNDSRMGPTILVLSPTRELATQIQVEALKFGKSSKISCACLYGGAPKGPQLKEIERGVDIVVATPGRLNDILEMKRISLHQVSYLVLDEADRMLDMGFEPQIRKIVNEVPTKRQTLMYTATWPKEVRKIAADLLVNPAQVNIGNVDELVANKSITQTIEVLAPMEKHSRLEQILRSQEPGSKIIIFCSTKRMCDQLARNLTRTFGAAAIHGDKSQAERDDVLNQFRSGRTPVLVATDVAARGLDVKDIRVVVNYDFPNGVEDYVHRIGRTGRAGATGLAYTFFGDQDAKHASDLIKILEGANQKVPPQVREMATRGGGGMNKFRRWGTPSSGGGGGRGGYGDSGYGGRGESGYGSRGDSGYGGRGDSGGRGSWAPSRDSSGSSGWGRERSRSPERFRGGPPSTSSPPRSFHEAMMMKNR

SEQ ID NO: 32023 - DNA, 2268 bp, Arabidopsis thaliana
  misc_feature (1)..(2268): Ceres Seq. ID no. 13591988
aaaagttggacatccttgcttttggtctaactttctctctcttgcttctacgcttcttcttgtggcgtagattgttatagagagggaaaccaaaaaagggaatctcaaaagctcgagttcacagatttgacccgagtctttaatccaatctgctggttcgttttccacattcaaactcgactcttgaatatcaaatcagaagtctttgctatggctgctaccgctgctgcttctgttgtccgttacgcacctgaggatcatactcttcccaagccctggaaaggccttatcgatgatagaactggttacttgtacttttggaatcctgagaccaatgttactcagtacgagaaaccaaccccctctctacctcctaagttttctcccgccgtttctgttagctcttccgttcaggttcaacaaactgatgcctatgctcctcccaaggatgacgataagtactccagaggctctgaacgtgtgtccaggttttctgagggtggcaggagtggaccgccttattcgaacggtgctgctaatggagttggggattctgcttatggtgcagcatctaccagagttcctcttccttcatcagctccagcaagtgaactatcccctgaggcctattcccgccgtcatgaaattactgtcagtgggggccaagtaccaccacctctaatgtcctttgaagctactggttttccacctgagcttctgcgggaggtactcagtgcaggtttctctgctccaactccaattcaagctcagtcatggcccattgctatgcaaggtagggacatagtagccattgctaaaactggctcgggaaaaactttgggttacttgattcctggatttttgcatcttcaacgtatccgaaatgattcgcgaatgggcccaacaatcttggtattgtctccaacgagagagctggccacacaaatccaagaagaagctgttaaatttgggaggtcatcaagaatttcgtgtacgtgtttgtatggtggtgcaccaaagggccctcagttgagggatttagaaagaggagcagatatcgtggttgcaactcctgggagattgaatgatatccttgaaatgaggaggattagtctgcgtcagatatcttatcttgtgctagatgaggcagatagaatgttggacatgggttttgaacctcagataaggaagattgtgaaagaaattcccactaagcgtcaaacccttatgtacacagctacatggccaaagggagttaggaaaattgcagctgacttgcttgttaaccctgctcaagtcaacattggcaatgttgacgagcttgtggctaacaagtcaatcacacagcatattgaagtggtagcaccaatggagaaacagaggaggttagagcagatcttgcggtctcaggaaccaggctcaaaggtgataatattctgctcaaccaaaaggatgtgtgatcaactaacacgcaatctaacccgccaatttggagctgctgctatacatggagacaagtcccagcctgagagagacaatgttcttaatcaattccgcagtggcagaactccggttcttgtagcaaccgatgttgctgctcgtggtctggacgttaaggacatcagggcggtcgtaaactatgatttccccaatggagtggaagactatgttcatagaatcggaagaacaggaagagctggagcgactggtcaggcattcacattctttggtgatcaagattcgaaacatgcttcggatctgatcaagattttggaaggagcaaaccagcgagttcctcctcagatccgcgaaatggctacacgtggtggtgggggaatgaacaaattcagtcgttggggacctccttccggcggccgtggtcgtggtggcgactctggttatggtggcagaggtagctttgcttcccgtgacagaagcagcaatggatggggaagagagcgagaaaggagccgtagccctgagagattcaacagagctccaccaccgtcttccaccggatctcctcctcgcagcttccacgagacgatgatgatgaaacacagatgaaaagagagatacaaagctctgataaagccaagtgacagaagattgtgttgtgggggatttcccttatcattgtgacattatatattttttggccgatgaagaaacaaaagaaaaaaaaacaagaccaagaagactgttccctcccattggaaatttacgctcaaaactacaattgatatcttacagtttgtatttcatctt

SEQ ID NO: 32024 - protein, 618 aa, Arabidopsis thaliana
  misc_feature (1)..(618): Ceres Seq. ID no. 13591989
MAATAAASVVRYAPEDHTLPKPWKGLIDDRTGYLYFWNPETNVTQYEKPTPSLPPKFSPAVSVSSSVQVQQTDAYAPPKDDDKYSRGSERVSRFSEGGRSGPPYSNGAANGVGDSAYGAASTRVPLPSSAPASELSPEAYSRRHEITVSGGQVPPPLMSFEATGFPPELLREVLSAGFSAPTPIQAQSWPIAMQGRDIVAIAKTGSGKTLGYLIPGFLHLQRIRNDSRMGPTILVLSPTRELATQIQEEAVKFGRSSRISCTCLYGGAPKGPQLRDLERGADIVVATPGRLNDILEMRRISLRQISYLVLDEADRMLDMGFEPQIRKIVKEIPTKRQTLMYTATWPKGVRKIAADLLVNPAQVNIGNVDELVANKSITQHIEVVAPMEKQRRLEQILRSQEPGSKVIIFCSTKRMCDQLTRNLTRQFGAAAIHGDKSQPERDNVLNQFRSGRTPVLVATDVAARGLDVKDIRAVVNYDFPNGVEDYVHRIGRTGRAGATGQAFTFFGDQDSKHASDLIKILEGANQRVPPQIREMATRGGGGMNKFSRWGPPSGGRGRGGDSGYGGRGSFASRDRSSNGWGRERERSRSPERFNRAPPPSSTGSPPRSFHETMMMKHR

SEQ ID NO: 32025 - protein, 461 aa, Arabidopsis thaliana
  misc_feature (1)..(461): Ceres Seq. ID no. 13591990
MSFEATGFPPELLREVLSAGFSAPTPIQAQSWPIAMQGRDIVAIAKTGSGKTLGYLIPGFLHLQRIRNDSRMGPTILVLSPTRELATQIQEEAVKFGRSSRISCTCLYGGAPKGPQLRDLERGADIVVATPGRLNDILEMRRISLRQISYLVLDEADRMLDMGFEPQIRKIVKEIPTKRQTLMYTATWPKGVRKIAADLLVNPAQVNIGNVDELVANKSITQHIEVVAPMEKQRRLEQILRSQEPGSKVIIFCSTKRMCDQLTRNLTRQFGAAAIHGDKSQPERDNVLNQFRSGRTPVLVATDVAARGLDVKDIRAVVNYDFPNGVEDYVHRIGRTGRAGATGQAFTFFGDQDSKHASDLIKILEGANQRVPPQIREMATRGGGGMNKFSRWGPPSGGRGRGGDSGYGGRGSFASRDRSSNGWGRERERSRSPERFNRAPPPSSTGSPPRSFHETMMMKHR

SEQ ID NO: 32026 - protein, 426 aa, Arabidopsis thaliana
  misc_feature (1)..(426): Ceres Seq. ID no. 13591991
MQGRDIVAIAKTGSGKTLGYLIPGFLHLQRIRNDSRMGPTILVLSPTRELATQIQEEAVKFGRSSRISCTCLYGGAPKGPQLRDLERGADIVVATPGRLNDILEMRRISLRQISYLVLDEADRMLDMGFEPQIRKIVKEIPTKRQTLMYTATWPKGVRKIAADLLVNPAQVNIGNVDELVANKSITQHIEVVAPMEKQRRLEQILRSQEPGSKVIIFCSTKRMCDQLTRNLTRQFGAAAIHGDKSQPERDNVLNQFRSGRTPVLVATDVAARGLDVKDIRAVVNYDFPNGVEDYVHRIGRTGRAGATGQAFTFFGDQDSKHASDLIKILEGANQRVPPQIREMATRGGGGMNKFSRWGPPSGGRGRGGDSGYGGRGSFASRDRSSNGWGRERERSRSPERFNRAPPPSSTGSPPRSFHETMMMKHR

SEQ ID NO: 32027 - DNA, 1918 bp, Arabidopsis thaliana
  misc_feature (1)..(1918): Ceres Seq. ID no. 13591992
gggcctcttcttttgaatcctcttagctctggcatcttcagatcgagacttggatttatcagcttctccgtgctcctttagcttctgctcggttttgttttttttagtctgacgatgagtaacaactggaaatccgttcgattaaggcttcaaaatcgtactctcgtgtttcttctggtgattttgagcttcggttcttgctattcgttgaaatctcaaggtgatggttttctggaatccgtgacgaaagatctatggtcagatatagatgctgaggatttgagagcagttggttttcacaggaaattacttggccgttttcgtaacccgtacacccatttgaatgcgttcagggaccgccctgtggcaagagctacacctccgtcatcttcggtttctacgagacctgatgccaaaagatcctctacattgcctccgccacaaaaaagtcctcctgcgcaacatgtttctgctccacctccttttgtgcaccatgtgactttacctagtctaacaagcagctccaaaacttcttcaaacagcacaattcctatagtggctggctgcatagcgggtgctgtgtttatcctccttttagctactggtgttttcttttttaaaagtaaggctgggaaatctgtgaatccctggcgtacaggtcttagtggacaacttcagaaagtgttcataactggtgtccccaaactcaaaagatctgagattgaagctgcctgtgaagattttagtaatgtcattgggtcttgccccattggtacattgttcaaagggacgctatcaagtggggtggagatagctgtggcttctgttgctactgcgtctgccaaagaatggacaaataatatagaaatgcagttcagaaagaagatcgaaatgttatccaagataaaccacaagaattttgtcaaccttcttggttactgtgaagaagaagaacctttcactaggatcttggtctttgaatatgcatcaaacggaacagtctttgaacatttacactataaagaatcagaacacttggactgggtaatgcggctaagaatagcaatgggcatagcttattgccttgaccatatgcacggactcaagccacctatagtccacagcaatcttctctcatcatcagttcaactcacagaggactacgcagtcaaaattgcggatttcaattttggatatttaaaaggcccatccgagacagaaagcagcaccaatgcactcatagatacaaacatctcagaaacaacacaagaagacaatgttcacagcttcgggttgctgttgtttgaactgatgacaggaaaactcccagagtcagttcaaaaaggtgactcgatagataccggattggctgtcttcttgagaggaaagacattaagggagatggtggatccgacaattgaaagctttgacgagaagattgagaatataggtgaagtgatcaaaagctgcataagagcagacgcgaaacagagaccgataatgaaggaagtcacagggagattacgagagatcactggattatcaccagacgacactatcccaaaactttcaccactctggtgggcagagctggaagttctgtccactgcgtgaagagacaactactgaacttcacaaaaaaatctgtaagtattaatatgaagatttgagtgaggtttttgagtctcttagaagctcttggcttctctttaggctactttcatctatctatctatatataagtatggaacttagtttatataacggctttaaaattcggtggatctatttggtcgtttatgtcgtaaacagaaaatgtcctaatcacggtaatacccctttttggtgtgcataatgttggtgggtggttactgtctttgtaaattagtgttactatgttcttggcggccgcgaattc

SEQ ID NO: 32028 - protein, 499 aa, Arabidopsis thaliana
  misc_feature (1)..(499): Ceres Seq. ID no. 13591993
MSNNWKSVRLRLQNRTLVFLLVILSFGSCYSLKSQGDGFLESVTKDLWSDIDAEDLRAVGFHRKLLGRFRNPYTHLNAFRDRPVARATPPSSSVSTRPDAKRSSTLPPPQKSPPAQHVSAPPPFVHHVTLPSLTSSSKTSSNSTIPIVAGCIAGAVFILLLATGVFFFKSKAGKSVNPWRTGLSGQLQKVFITGVPKLKRSEIEAACEDFSNVIGSCPIGTLFKGTLSSGVEIAVASVATASAKEWTNNIEMQFRKKIEMLSKINHKNFVNLLGYCEEEEPFTRILVFEYASNGTVFEHLHYKESEHLDWVMRLRIAMGIAYCLDHMHGLKPPIVHSNLLSSSVQLTEDYAVKIADFNFGYLKGPSETESSTNALIDTNISETTQEDNVHSFGLLLFELMTGKLPESVQKGDSIDTGLAVFLRGKTLREMVDPTIESFDEKIENIGEVIKSCIRADAKQRPIMKEVTGRLREITGLSPDDTIPKLSPLWWAELEVLSTA

SEQ ID NO: 32029 - DNA, 1512 bp, Arabidopsis thaliana
  misc_feature (1)..(1512): Ceres Seq. ID no. 13591994
gagatttatatagagagaaaaaaactatggctcacataaagatctaacagagacagtagtatagtcccacttccccaccaccaaagcttcgatcatcatcatcatcatcatcatggatccggatccggatcataaccatcgacccaacttccctctccagcttcttgattcttctacctcctcctcttccacttccttagccatcatctctactacttccgaacctaactccgaacctaagaagcctcctcctaaacgaacctctactaaagaccgacacaccaaagtcgaaggccgaggccgtcggatccgtatgcctgccatgtgtgctgcacgtgtctttcagctcacacgtgagcttggtcacaaatccgacggtgaaactattgagtggctactccaacaagcagaaccagcggttatagccgctacagggactggaaccattccggctaacttcacttctttaaacatctcacttcgtagctcaagatcttctctctctgctgctcatcttcgtacaactcctagtagctattactttcattcaccacatcagtccatgactcatcatcttcaacatcagcatcaggttcgtcccaagaacgagtcacattcttcgtcttcttcttcttcacagcttttagatcacaaccaaatgggtaactatctagtacaatcaactgctggatctttacctacgagtcagagtcctgcaacggcaccgttttggagtagtggtgacaacacacagaatctttgggcttttaatattaatcctcatcattccggtgttgtcgccggagatgtttacaaccccaacagtggtggtagtggcggcggtagtggagttcatttgatgaattttgcagctcctattgctttgttttctggacagcctttggcttctggttatggaggaggaggaggtggcggtggagaacatagccattatggagttttagcggcgttgaatgctgcttaccgaccggtggcggagacggggaaccataacaacaaccagcaaaaccgtgacggagatcatcatcacaaccatcaagaagatggaagcaccagtcatcattcctaggcaaacatacacaaacaaatatattctgtgagatttatttttctttttttgtcctttcgtttgtttgtttgttcttaacaagcgtgttttttttgcattgcttctttttcatatatttttatttatttctaaattctaatattctacggatttcatcttgtttatttttctgattaatgtattgagtaagtaattaagaacctgataatcgatatgttttagtttgtggtttttgcatgcaaggctttggttttattattctagagatttttgcttgaagtagttgtcttgtgaaatgttttcctcattactattgagtgtgagagttttctaatacttgattagggtttttgaacaatttttatatatgtatattaattcagtacggattatcaataaattatttcgcatgccaaattatt

SEQ ID NO: 32030 - protein, 325 aa, Arabidopsis thaliana
  misc_feature (1)..(325): Ceres Seq. ID no. 13591995
MDPDPDHNHRPNFPLQLLDSSTSSSSTSLAIISTTSEPNSEPKKPPPKRTSTKDRHTKVEGRGRRIRMPAMCAARVFQLTRELGHKSDGETIEWLLQQAEPAVIAATGTGTIPANFTSLNISLRSSRSSLSAAHLRTTPSSYYFHSPHQSMTHHLQHQHQVRPKNESHSSSSSSSQLLDHNQMGNYLVQSTAGSLPTSQSPATAPFWSSGDNTQNLWAFNINPHHSGVVAGDVYNPNSGGSGGGSGVHLMNFAAPIALFSGQPLASGYGGGGGGGGEHSHYGVLAALNAAYRPVAETGNHNNNQQNRDGDHHHNHQEDGSTSHHS

SEQ ID NO: 32031 - protein, 258 aa, Arabidopsis thaliana
  misc_feature (1)..(258): Ceres Seq. ID no. 13591996
MPAMCAARVFQLTRELGHKSDGETIEWLLQQAEPAVIAATGTGTIPANFTSLNISLRSSRSSLSAAHLRTTPSSYYFHSPHQSMTHHLQHQHQVRPKNESHSSSSSSSQLLDHNQMGNYLVQSTAGSLPTSQSPATAPFWSSGDNTQNLWAFNINPHHSGVVAGDVYNPNSGGSGGGSGVHLMNFAAPIALFSGQPLASGYGGGGGGGGEHSHYGVLAALNAAYRPVAETGNHNNNQQNRDGDHHHNHQEDGSTSHHS

SEQ ID NO: 32032 - protein, 255 aa, Arabidopsis thaliana
  misc_feature (1)..(255): Ceres Seq. ID no. 13591997
MCAARVFQLTRELGHKSDGETIEWLLQQAEPAVIAATGTGTIPANFTSLNISLRSSRSSLSAAHLRTTPSSYYFHSPHQSMTHHLQHQHQVRPKNESHSSSSSSSQLLDHNQMGNYLVQSTAGSLPTSQSPATAPFWSSGDNTQNLWAFNINPHHSGVVAGDVYNPNSGGSGGGSGVHLMNFAAPIALFSGQPLASGYGGGGGGGGEHSHYGVLAALNAAYRPVAETGNHNNNQQNRDGDHHHNHQEDGSTSHHS

SEQ ID NO: 32033 - DNA, 2234 bp, Arabidopsis thaliana
  misc_feature (1)..(2234): Ceres Seq. ID no. 13592003
ggtggttaaacaaaacaaaacaaacaaacaaagcgggctttgaaaactccgcctccgtttgttggctatttacactcactctgtctccgccggtagatttgtcagctgcgtcttcctcgttttctctctctctgtctgtgtctcttagaatgcaatcagctatggcgctttcgttctcccagacgtcgtttacaagaccaaaccacgtgctcggatcatctggttctgttttctctacgcccagaagtctccggttctgcggactccggcgggaagcgtttggtttctcaacgtcgaatcagttggctattcgcagtaaccgaatccaatttctaagtaggaagtcattccaagtctccgcttctgcttcaagtaatggtaatggcgctccaccgaaatctttcgattacgatttgatcatcatcggagctggagttggtggccacggagctgctttgcacgccgttgaaaagggacttaaaacagccattattgaaggagatgttgttggagggacttgtgttaacagaggatgtgtgccttctaaagctcttcttgctgttagtggtcgaatgcgggaacttcagaacgaacatcacatgaagtcctttggtctccaggtttcagctgctggatatgatcgtcagggtgtggcagatcatgctaataatctggctaccaaaatacgaaacaatctgaccaattcaatgaaggcaattggtgttgacatattgactggatttggcagtgttctgggtccacaaaaggttaaatatgggaaggacaatattattactgcaaaagatataatcattgccactggatctgtgccgtttgtccctaaaggaattgaagttgatggaaagactgtgatcaccagtgaccatgctttgaaattagagtctgtccctgagtggattgcaattgtaggaagtggttatattggtcttgagttcagtgatgtttacacagctcttggaagtgaggtaacttttatagaagcactggatcagctaatgcctggatttgatcctgagatcagtaagctagctcagagggttttgataaatccaagaaagattgactatcatactggagtctttgcaagcaaaattactccggcaagggatgggaaaccagttctgattgagcttattgatgccaaaaccaaggaacctaaggatactttggaggtagatgctgctcttattgctactgggagagctccattcaccaatggacttggcttggaaaatgtcaatgttgtgacgcagagaggtttcataccagttgatgagcgaatgcgtgtgatcgatggaaaggggactctggttccgaacttgtactgcattggtgatgccaatggtaaattgatgcttgcacatgcagccagtgcccaaggaatttctgtggtcgagcaagtcagcggcagagatcatgtgcttaatcatcttagcatcccagctgcttgctttactcatcctgaaatcagcatggtgggattaacagagcctcaagcaaaagaaaaaggcgagaaggaaggatttaaagttagtgttgtcaagacaagtttcaaggctaacacaaaggccctagctgaaaatgaaggagaaggaatagctaagatgatataccgacctgacaatggtgaaatcttaggagttcatatatttggactgcatgcagctgaccttatccatgaagcttctaatgcgattgctctaggaacgcgtattcaggacataaaattggcagttcatgcacatccaacactctctgaggtcctcgacgaactgttcaaagcagccaaggttgaaagtcatgctacgacaaggacagtaagtgaaaaagtggttgtataataagaaaccaaaaacttattggggtggggagaaacatcttgaagaaagaaaatttgtgattgtactttagggagatgcaaagataaagctaaacacgaaccaggaagatcgaaaaggaagaagaagaggaggagatgatgagaaacaaccttccgtaagtaaagacttgaaagatatatctacaaggccttcttctttctttgagaatatttctgttggagtcttgtctctgctttcacttatatttgtttaattgttccatggtttcaattagtggagattgtggttttggttattgtatgtttgtttgatgtgaacgattttggatgattcttctctttttactagtaaaatcacttgtctgtccattat

SEQ ID NO: 32034 - protein, 619 aa, Arabidopsis thaliana
  misc_feature (1)..(619): Ceres Seq. ID no. 13592004
WLNKTKQTNKAGFENSASVCWLFTLTLSPPVDLSAASSSFSLSLSVSLRMQSAMALSFSQTSFTRPNHVLGSSGSVFSTPRSLRFCGLRREAFGFSTSNQLAIRSNRIQFLSRKSFQVSASASSNGNGAPPKSFDYDLIIIGAGVGGHGAALHAVEKGLKTAIIEGDVVGGTCVNRGCVPSKALLAVSGRMRELQNEHHMKSFGLQVSAAGYDRQGVADHANNLATKIRNNLTNSMKAIGVDILTGFGSVLGPQKVKYGKDNIITAKDIIIATGSVPFVPKGIEVDGKTVITSDHALKLESVPEWIAIVGSGYIGLEFSDVYTALGSEVTFIEALDQLMPGFDPEISKLAQRVLINPRKIDYHTGVFASKITPARDGKPVLIELIDAKTKEPKDTLEVDAALIATGRAPFTNGLGLENVNVVTQRGFIPVDERMRVIDGKGTLVPNLYCIGDANGKLMLAHAASAQGISVVEQVSGRDHVLNHLSIPAACFTHPEISMVGLTEPQAKEKGEKEGFKVSVVKTSFKANTKALAENEGEGIAKMIYRPDNGEILGVHIFGLHAADLIHEASNAIALGTRIQDIKLAVHAHPTLSEVLDELFKAAKVESHATTRTVSEKVVV

SEQ ID NO: 32035 - protein, 570 aa, Arabidopsis thaliana
  misc_feature (1)..(570): Ceres Seq. ID no. 13592005
MQSAMALSFSQTSFTRPNHVLGSSGSVFSTPRSLRFCGLRREAFGFSTSNQLAIRSNRIQFLSRKSFQVSASASSNGNGAPPKSFDYDLIIIGAGVGGHGAALHAVEKGLKTAIIEGDVVGGTCVNRGCVPSKALLAVSGRMRELQNEHHMKSFGLQVSAAGYDRQGVADHANNLATKIRNNLTNSMKAIGVDILTGFGSVLGPQKVKYGKDNIITAKDIIIATGSVPFVPKGIEVDGKTVITSDHALKLESVPEWIAIVGSGYIGLEFSDVYTALGSEVTFIEALDQLMPGFDPEISKLAQRVLINPRKIDYHTGVFASKITPARDGKPVLIELIDAKTKEPKDTLEVDAALIATGRAPFTNGLGLENVNVVTQRGFIPVDERMRVIDGKGTLVPNLYCIGDANGKLMLAHAASAQGISVVEQVSGRDHVLNHLSIPAACFTHPEISMVGLTEPQAKEKGEKEGFKVSVVKTSFKANTKALAENEGEGIAKMIYRPDNGEILGVHIFGLHAADLIHEASNAIALGTRIQDIKLAVHAHPTLSEVLDELFKAAKVESHATTRTVSEKVVV

SEQ ID NO: 32036 - protein, 566 aa, Arabidopsis thaliana
  misc_feature (1)..(566): Ceres Seq. ID no. 13592006
MALSFSQTSFTRPNHVLGSSGSVFSTPRSLRFCGLRREAFGFSTSNQLAIRSNRIQFLSRKSFQVSASASSNGNGAPPKSFDYDLIIIGAGVGGHGAALHAVEKGLKTAIIEGDVVGGTCVNRGCVPSKALLAVSGRMRELQNEHHMKSFGLQVSAAGYDRQGVADHANNLATKIRNNLTNSMKAIGVDILTGFGSVLGPQKVKYGKDNIITAKDIIIATGSVPFVPKGIEVDGKTVITSDHALKLESVPEWIAIVGSGYIGLEFSDVYTALGSEVTFIEALDQLMPGFDPEISKLAQRVLINPRKIDYHTGVFASKITPARDGKPVLIELIDAKTKEPKDTLEVDAALIATGRAPFTNGLGLENVNVVTQRGFIPVDERMRVIDGKGTLVPNLYCIGDANGKLMLAHAASAQGISVVEQVSGRDHVLNHLSIPAACFTHPEISMVGLTEPQAKEKGEKEGFKVSVVKTSFKANTKALAENEGEGIAKMIYRPDNGEILGVHIFGLHAADLIHEASNAIALGTRIQDIKLAVHAHPTLSEVLDELFKAAKVESHATTRTVSEKVVV

SEQ ID NO: 32037 - DNA, 1877 bp, Arabidopsis thaliana
  misc_feature (1)..(1877): Ceres Seq. ID no. 13592013
gacgtaagattcttctccttttgaactgtaaaattcactcttttttaatttcttaatctttcttatcattactttctctattttattttgncattttctcttaaaccttcttcttcttcttcctttgatcagtaaaaaaagtcaccgccttcttcttctctttcctctttcccctaattgatcaatcatgcttcttcatttctagttctctcttcctgactcatttccctcattagatcttcttctccactaaacccataattgaaagaagctctttttttgcttacattgaagttaaaaaatcatcacttgttttgtttttgaagaaacacacataaagtttgtctttttacttctcaaatttggttgttttcactcaatttcaatcttgctttctgattcagattctgggttttcttcagaattcccagagaagttgttggaattgaatttttcacttttttgttcataaaagttctagtctttttagatgaacatggacaaggaaacagagcaaaccctaaattacttacctttgggtcagagcgatccctttggcaatggcaatgaaggaacaattggagatttccttggaagatactgcaacaaccctcaggagatttcaccgttaactctacaatccttctctctgaattctcagatctccgagaatttcccaatctctggtggaatcagattccctccatatccaggtcaatttggatccgatcgtgaatttgggtcacaaccaacaacgcaggagagtaacaagagctctttgttggatccagattcagtttcggatcgagttcacaccacgaaatctaactctagaaagaggaagtcgattcctagtggtaatggcaaggagtctccagcttcatcgtctcttacagcttccaattcaaaggtttcaggagagaatggtggatctaaaggtgggaagagaagcaagcaagatgtagctgggagtagtaaaaacggagtagagaagtgcgatagtaaaggcgacaataaggacgatgctaagcctcctgaggcgcctaaagattatattcatgtcagagctagaaggggtcaagcaactgatagccatagtcttgctgaaagagcaagaagagaaaagattagtgagagaatgacgttgcttcaggatctggttcctggttgcaaccggattacagggaaagcagtcatgcttgatgaaattataaattatgtgcagtccttgcagagacaagttgagttcttgtccatgaagctggctaccgtaaatccaaggatggagtttaatgctaatgcttctttatccacagagatgattcaaccgggggagtcgttaacgcagtctctttacgcaatggcttgctcagagcaaagacttccatcagcatactattcacttggcaagaacatgccaagattctcagacacacaattcccctcaaacgatggatttgttcacactgagacaccaggattctgggaaaataatgacctgcaaagcattgttcagatgggttttggagatatcctccagcaacagagcaacaacaacaacaacaactgttctgagccaacgcttcagatgaagcttgaaccatagtccatagctatgattattatctctgttgtacatacagaaaaccaagtagtgatgagtaacggagtgaatcatattggaattttaatgtttacaatcgttgcttctttgcttgtgtctctgttgatttcttctcaaccttaaacaaaaaaaaaacaagaaaacttcagattaagtatgtaaaaatatgacaagaacttttctctgtactgttttacaatcgttatgtattatgattgctctaagcttgtaagaaacaggaataaatttgttc

SEQ ID NO: 32038 - protein, 371 aa, Arabidopsis thaliana
  misc_feature (1)..(371): Ceres Seq. ID no. 13592014
MNMDKETEQTLNYLPLGQSDPFGNGNEGTIGDFLGRYCNNPQEISPLTLQSFSLNSQISENFPISGGIRFPPYPGQFGSDREFGSQPTTQESNKSSLLDPDSVSDRVHTTKSNSRKRKSIPSGNGKESPASSSLTASNSKVSGENGGSKGGKRSKQDVAGSSKNGVEKCDSKGDNKDDAKPPEAPKDYIHVRARRGQATDSHSLAERARREKISERMTLLQDLVPGCNRITGKAVMLDEIINYVQSLQRQVEFLSMKLATVNPRMEFNANASLSTEMIQPGESLTQSLYAMACSEQRLPSAYYSLGKNMPRFSDTQFPSNDGFVHTETPGFWENNDLQSIVQMGFGDILQQQSNNNNNNCSEPTLQMKLEP

SEQ ID NO: 32039 - protein, 369 aa, Arabidopsis thaliana
  misc_feature (1)..(369): Ceres Seq. ID no. 13592015
MDKETEQTLNYLPLGQSDPFGNGNEGTIGDFLGRYCNNPQEISPLTLQSFSLNSQISENFPISGGIRFPPYPGQFGSDREFGSQPTTQESNKSSLLDPDSVSDRVHTTKSNSRKRKSIPSGNGKESPASSSLTASNSKVSGENGGSKGGKRSKQDVAGSSKNGVEKCDSKGDNKDDAKPPEAPKDYIHVRARRGQATDSHSLAERARREKISERMTLLQDLVPGCNRITGKAVMLDEIINYVQSLQRQVEFLSMKLATVNPRMEFNANASLSTEMIQPGESLTQSLYAMACSEQRLPSAYYSLGKNMPRFSDTQFPSNDGFVHTETPGFWENNDLQSIVQMGFGDILQQQSNNNNNNCSEPTLQMKLEP

SEQ ID NO: 32040 - DNA, 1488 bp, Arabidopsis thaliana
  misc_feature (1)..(1488): Ceres Seq. ID no. 13592020
ggtgaagctccgatctgagtttttagcaatggcgaaactaaaccctaaattcatctctttgattcttttcgctctcgtggtgatcgtctctgctgaagttatcttcgaggagaaattcgaagatggatgggagaagagatgggtaaaatctgactggaagaaagatgataatactgctggggaatggaaacacacagctggaaattggtctggtgatgctaacgataaaggtatccaaactagcgaggactacagattctacgctatatcagctgaattccctgagtttagcaacaaggataagaccttagtcttccaattctctgtcaagcatgagcagaagcttgactgtggtggtggctacatgaagttgctaagtgatgatgttgaccagacgaaattcggaggagacactccttacagcattatgtttgggccagatatttgtggctacagcactaagaaagtacatgctatccttacttacaatggaaccaaccatttgatcaagaaggaggtcccatgtgagactgatcagcttactcacgtgtacaccttcgtcctccgtccagatgctacttacagtattttgattgataatgttgagaagcaaactggtagcctttactctgactgggatcttctcccagcaaagaagattaaggatccaagtgctaagaagcctgaggactgggatgacaaagagtacattccagatccagaagacactaagccagcgggatatgatgacatcccaaaggagattccagacactgacgcaaagaagcctgaggactgggatgatgaagaagatggtgagtggactgcccctaccattcccaaccccgagtacaatggtgaatggaagcccaagaaaattaagaaccccgcttacaagggcaagtggaaggctccaatgatcgacaaccctgaattcaaggatgacccagaactctatgtcttccccaaattgaagtatgttggagttgagttgtggcaggtgaaatctggttccttgttcgacaatgtcttggtcagcgatgacccagagtacgctaagaagttggccgaggaaacctggggaaagcacaaggatgcggagaaagcagcatttgacgaagctgagaagaagagagaggaagaggaatcaaaggatgctcctgctgaatccgacgctgaggaagaagcagaagatgatgacaatgaaggagatgactcagacaatgaatcaaagtctgaggaaaccaaggaggccgaggaaaccaaggaagccgaggaaaccgatgccgcccatgacgagctctaagcaaaggtggaggattaaaaagttttcagagtcttaattgttcttttaaacttttcttttaaaaggaattctttagctctagtttggttggaatgtagaactttttagctattattatggtgaaatggttgtggtaactttgttttagactttgagaaaatcctgactttctccttctcttt

SEQ ID NO: 32041 - protein, 434 aa, Arabidopsis thaliana
  misc_feature (1)..(434): Ceres Seq. ID no. 13592021
VKLRSEFLAMAKLNPKFISLILFALVVIVSAEVIFEEKFEDGWEKRWVKSDWKKDDNTAGEWKHTAGNWSGDANDKGIQTSEDYRFYAISAEFPEFSNKDKTLVFQFSVKHEQKLDCGGGYMKLLSDDVDQTKFGGDTPYSIMFGPDICGYSTKKVHAILTYNGTNHLIKKEVPCETDQLTHVYTFVLRPDATYSILIDNVEKQTGSLYSDWDLLPAKKIKDPSAKKPEDWDDKEYIPDPEDTKPAGYDDIPKEIPDTDAKKPEDWDDEEDGEWTAPTIPNPEYNGEWKPKKIKNPAYKGKWKAPMIDNPEFKDDPELYVFPKLKYVGVELWQVKSGSLFDNVLVSDDPEYAKKLAEETWGKHKDAEKAAFDEAEKKREEEESKDAPAESDAEEEAEDDDNEGDDSDNESKSEETKEAEETKEAEETDAAHDEL

SEQ ID NO: 32042 - protein, 425 aa, Arabidopsis thaliana
  misc_feature (1)..(425): Ceres Seq. ID no. 13592022
MAKLNPKFISLILFALVVIVSAEVIFEEKFEDGWEKRWVKSDWKKDDNTAGEWKHTAGNWSGDANDKGIQTSEDYRFYAISAEFPEFSNKDKTLVFQFSVKHEQKLDCGGGYMKLLSDDVDQTKFGGDTPYSIMFGPDICGYSTKKVHAILTYNGTNHLIKKEVPCETDQLTHVYTFVLRPDATYSILIDNVEKQTGSLYSDWDLLPAKKIKDPSAKKPEDWDDKEYIPDPEDTKPAGYDDIPKEIPDTDAKKPEDWDDEEDGEWTAPTIPNPEYNGEWKPKKIKNPAYKGKWKAPMIDNPEFKDDPELYVFPKLKYVGVELWQVKSGSLFDNVLVSDDPEYAKKLAEETWGKHKDAEKAAFDEAEKKREEEESKDAPAESDAEEEAEDDDNEGDDSDNESKSEETKEAEETKEAEETDAAHDEL

SEQ ID NO: 32043 - protein, 313 aa, Arabidopsis thaliana
  misc_feature (1)..(313): Ceres Seq. ID no. 13592023
MKLLSDDVDQTKFGGDTPYSIMFGPDICGYSTKKVHAILTYNGTNHLIKKEVPCETDQLTHVYTFVLRPDATYSILIDNVEKQTGSLYSDWDLLPAKKIKDPSAKKPEDWDDKEYIPDPEDTKPAGYDDIPKEIPDTDAKKPEDWDDEEDGEWTAPTIPNPEYNGEWKPKKIKNPAYKGKWKAPMIDNPEFKDDPELYVFPKLKYVGVELWQVKSGSLFDNVLVSDDPEYAKKLAEETWGKHKDAEKAAFDEAEKKREEEESKDAPAESDAEEEAEDDDNEGDDSDNESKSEETKEAEETKEAEETDAAHDEL

SEQ ID NO: 32044 - DNA, 1207 bp, Arabidopsis thaliana
  misc_feature (1)..(1207): Ceres Seq. ID no. 13592036
ctctccaccgtcggctcagatctagacggaaatgtgccggtgaaatcgaatcatgaaaagatctcacatttcgtctcctcgttcttattcacgaccagcgatttcaatcttcggtgtcttcctcttgtttcttctggttttaacactaagctctcgaaaaccatcagattcatcctccggtttagctccaaatcgaaacttagccacaaaatcgacgattccgaggtttgcgtatttggtaacgggaacgaaaggagatgggaaacgagtgaagcggctgcttaaagcaatacatcatccgagaaattactatctgcttcatttggatctcgaagcttcagatgaagagagaatggagctggcgaagtatgtgagatcggagaagaagaagtttgagaatgttatggtaatgggtttagctgatttggttacggagaaaggtccaacgatgttagctagtacgcttcatggtgttgccattttgttgaagaaagctaaggattgggattggtttattaatcttagtgcttctgattatcctttaatgcctcaagatgatattttgcatatattctcatacttgccacgctacctgaactttatcgagcacacaagcaacatcggttggaaagagaaccaaagagcaaggcctatcattattgatcctggtttttaccatttgaagaaatctggtgtcttttgggctaaagaacggagatctttgcctgcttcattcaaacttttcatgggttcaaccagcgttgctttaacaagaccgttcctcgagttttgcatttggggatgggataatctcccaagaacgctattgatgtactataccaacttcctcttgtcatctgaaggctactttcagacagttgtgtgcaacaataaagattatcagaacacaacggttaaccacgacctgcattacacaaaatgggatccgcttcaacagcgcaccctgaatgtaacggttgagaatttccgcgatatggtccaaagcggggctccattcgcaagggagtttcgagaggatgatcttgtactcgataagattgacattgagctactaggtcaaaccgatactggattggagttgaagactccggatgttgttaaaccaacggttagttggaagaggcttgagaagctcatggttaggcttcttgatcatgagaatttcagggctaagcaatgtaaataa

SEQ ID NO: 32045 - protein, 384 aa, Arabidopsis thaliana
  misc_feature (1)..(384): Ceres Seq. ID no. 13592037
MKRSHISSPRSYSRPAISIFGVFLLFLLVLTLSSRKPSDSSSGLAPNRNLATKSTIPRFAYLVTGTKGDGKRVKRLLKAIHHPRNYYLLHLDLEASDEERMELAKYVRSEKKKFENVMVMGLADLVTEKGPTMLASTLHGVAILLKKAKDWDWFINLSASDYPLMPQDDILHIFSYLPRYLNFIEHTSNIGWKENQRARPIIIDPGFYHLKKSGVFWAKERRSLPASFKLFMGSTSVALTRPFLEFCIWGWDNLPRTLLMYYTNFLLSSEGYFQTVVCNNKDYQNTTVNHDLHYTKWDPLQQRTLNVTVENFRDMVQSGAPFAREFREDDLVLDKIDIELLGQTDTGLELKTPDVVKPTVSWKRLEKLMVRLLDHENFRAKQCK

SEQ ID NO: 32046 - protein, 284 aa, Arabidopsis thaliana
  misc_feature (1)..(284): Ceres Seq. ID no. 13592038
MELAKYVRSEKKKFENVMVMGLADLVTEKGPTMLASTLHGVAILLKKAKDWDWFINLSASDYPLMPQDDILHIFSYLPRYLNFIEHTSNIGWKENQRARPIIIDPGFYHLKKSGVFWAKERRSLPASFKLFMGSTSVALTRPFLEFCIWGWDNLPRTLLMYYTNFLLSSEGYFQTVVCNNKDYQNTTVNHDLHYTKWDPLQQRTLNVTVENFRDMVQSGAPFAREFREDDLVLDKIDIELLGQTDTGLELKTPDVVKPTVSWKRLEKLMVRLLDHENFRAKQCK

SEQ ID NO: 32047 - protein, 267 aa, Arabidopsis thaliana
  misc_feature (1)..(267): Ceres Seq. ID no. 13592039
MVMGLADLVTEKGPTMLASTLHGVAILLKKAKDWDWFINLSASDYPLMPQDDILHIFSYLPRYLNFIEHTSNIGWKENQRARPIIIDPGFYHLKKSGVFWAKERRSLPASFKLFMGSTSVALTRPFLEFCIWGWDNLPRTLLMYYTNFLLSSEGYFQTVVCNNKDYQNTTVNHDLHYTKWDPLQQRTLNVTVENFRDMVQSGAPFAREFREDDLVLDKIDIELLGQTDTGLELKTPDVVKPTVSWKRLEKLMVRLLDHENFRAKQCK

SEQ ID NO: 32048 - DNA, 5274 bp, Arabidopsis thaliana
  misc_feature (1)..(5274): Ceres Seq. ID no. 13592043
atggactcacaagatcacaaagcacctggctttgttgacatagtcaaatcttggatccctagaaagagtgagtcctcaaatatgtcgagggatttttggatgcctgaccaaagctgtcctgtgtgttatgagtgtgatgctcagttcactgtgtttaatcgaagacatcattgccgcctttgtggtcgagttttttgtgccaaatgcgctgcaaattccattccatctccatcagatgaaacaaaggatagtcatgaggaaccagaaaggattagggtgtgtaattactgctacaaacagtgggaacaggggatagttccccctgataatggggcttctattattagccttcattttagttcatcgccttctgctagaagcgtcgcaagtactacctctaatagtagcaactgcaccattgattcaactgctggaccttcccctagacccaaaatgaatccccgagctagccgtcgtgtctcgtcaaacatggattctgaaaagtctgagcagcagaatgcaaaatcgcgtaggagctcagatcattatgggcatgtgttagattcttctgataatcaagttgaattctttgtcaacagtagtggcaggagtgatggtgaagctgatgacgatgacgattatcaatctgattttgcacaatcttacgctcaaggaaatgactactatggtgccatcaacctcgatgaagtagaccatatctatgggtcacatgaagctcatgacgttggtgtaaaaatagaaccaaacataagtggctttccccctgatcaagatcttgactcactgaatacagagacgatagataaaaccagacaccaagaaaatggatggaccgatgtaaaggagggaagccctccttgtgaagagtcctttgagcccgaagttgttgattttgagagtgatgggctcttatggctaccaccagagccagagaacgaagaagatgaaagagaagcagtgctatctgatgatgacggtgatgaaggtgatagaggtgattgggggtaccttcgcccatcaaatagctttaacgagaaggatttccactctaaggacaagtccagtggtgctatgaaaaatgttgttgaagggcactttagggctttggtagcacaacttttggaggttgataatctacctatggtcaacgaaggtgatgaagagggctggcttgatataattacatcattatcttgggaggctgcaacgcttctcaagccagatacaagtaaaagtggaggaatggatccaggaggatacgtgaaggttaaatgcatcccttgtggacgtcgcagtgagagtatggtcgtgaaaggagttgtttgtaagaaaaatgtggctcatcggcgaatgacttcaaagatcgagaagccgcgtctgctaatccttggaggagctctggagtatcagcgcatctctaaccagctgtctagttttgacactttgttgcaacaggaaatggaccatttgaagatggctgttgccaaaattgattctcacaatcctgacattctcttggtggagaaatctgtctcgcggtttgcgcaggaatatcttctcgcgaaggacatatctctcgtgttaaatattaaaaggtcccttctagagcgcatatcccgctgtactggtgcgcagattgtcccttcgatcgaccagctcacatcaccaaagctaggttattgtgacctgttccatgtggaaaagtttgtggagacacatgttagtccttgtcaagttgcgaagaaaatggccaagactttaatgttttttgatggctgcccgaaacctttgggttgtacaatattgctcaagggggcacatgaagatgagctaaagaaggtgaaacatgtgattcagtatggagtttttgcagcatatcacttggctcttgagacatccttcctagcagatgaaggtgcttccattcacgaacttcctctgcagaccccaattactgtggcgttacctgataaaccatcaatggttaacagatcaatatccacaatacctggttttactgtgtcaagtgctgaaaagtctccaactactgagttaaggggtgagccacataaagccaatggcgaccttactggtaatttcacttctagtaagactcatttccaagggaaattggatggaaacgacaggattgacccatctgaaagactgcttcacaacttggatactgtttactgtaagcctccagaaactattacctctaaggacgatgggttagttcctactctagaatccaggcagctatcatttcacgtggaagaaccttctgttcaaaaagatcagtggtctgttttatccggtgccacagaacaagtaacagatggtggttacacgaatgactccgcagtaataggaaatcaaaattttaatagacaggaacaaatggaatcttcaaaaggagactttcatccgtcagcttctgaccatcaaagtatattggtttccttatcaacaagatgcgtatggaaaggatctgtgtgtgagcgggctcatctactccgtatcaaatactatgggagctttgacaagcctttaggacggtttttaagggataatctctttgatcaggatcagtgctgcccgtcatgtacgatgccagcggaagcacacattcattgttatactcataggcaaggtagtctgacaatatctgttaagaaactgcctgaattgctacctgggcaacgtgaagggaagatttggatgtggcatcggtgcctgaaatgtcctcggatcaatggctttcctccagccacacgcagaattgtaatgtcagatgctgcgtggggcctgtcttttggcaaatttttggagctgagcttttctaaccatgcagcggctagtcgtgtggccaactgtggtcattcccttcacagagactgtctccggttctacggttttgggagaatggttgcttgcttccgctatgcttcaatcaatatttacgcagtgactctgccaccagcaaagctttattttaactatgagaaccaggaatggctccaaaaggaatcaaaagaggtgattaaaaaagcggaagtcctttttaatgaggttcaggaggctcttagtcaaatttcagcgaaaactatgggcgcaggttccaagggcagcactcccaacaagatcaagctttctcttgaagaacttgcaggacttcttgagcaacgtaaaaaggaatataaggattcattgcagcaaatgttaaatgtggttaaggatggacaacctactattgatatccttctgataaataaacttcgaaggctgataattttcgattcatatgcttgggatgaatgcctagcaggggcggccaatatggtaagaaataactatttggaagctccgaagaattcagccccaaaagttatgggtcgtaacgtctccttagagaagctcagtgatgaaaaagtaaagtcgataccgacccatgttgcaatttgtaatgactctcttctccaggatgcagactacgaaacgtgtcttaaccaaggtaaatcatttgctgatactagtggcaaatttgctattcctgaagatgtaggctcagacagacccccagattgtaggatggagttcgaccctagtgaaggtggtaaagataattttgtagagtcttcgcaggtggttaaaccagcacacaccgagagccagtttcaagcaacagacttatctgatactcttgatgcagcatggataggtgaacaaactacttcagagaatggtattttccgtccgcctagcagagctgcttcaacaaatggaactcagatccctgatttaaggctgttgggttcagaaagtgagctgaactttaaaggaggccctaccaatgatgaacatacaacacaagttcagttgccttctcctagtttctactattcactcaacaagaattattcgcttaattctcgcaagcatatcatggctgaagaccggcctgtttatgtttcttcatatagagagcttgaatggcgaagtggtgcaaggctgctgcttcctctgggatgtaatgacttagtactgccagtttatgatgacgaacctactagtatcatagcttatgcccttacatcatcagaatataaagctcagatgtctggatcagataagtcaagagatcgcttggatagtggaggttccttttcactttttgattctgttaatcttctctcattgaactctttgagtgatttgtcggtcgacatgagtagaagtcttagctctgctgatgaacaagtctcgcagctgctacattcatcactgtatttgaaagatctgcatgcgaggatttcgtttacagatgaaggtcctcctgggaaagtgaagtactctgtgacgtgttattatgctaaggagtttgaagccctgaggatgatttgctgtccttcagaaacagatttcattagatctcttggtcgttgtagaaaatggggagcccagggtggaaagagcaacgtcttctttgcaaaaagtttggatgaccgttttatcatcaagcaagttacaaagacagagcttgagtccttcatcaaatttgggccagcttacttcaaatacctgactgagtccatcagtactaaaagccctacaagccttgcaaagatcttgggaatctatcaggtttcatccaaacaccttaaaggaggaaaagagttcaaaatggacgtcttggtgatggagaatcttctgttcaagcgaaacttcactaggctttatgacctaaaaggctccactcgggctcgttacaatcccgatacaagtggtagcaatacagttttgctggatcagaatcttgtcgaagcaatgccaacatctccaatatttgttgggagcaaggcaaaacggcttcttgaaagagcagtctggaatgatacatcatttcttgcttcgattcacgtaatggattactccttactagtcggggtagatgaggaaagaaacgagctggttctaggaattatcgatttcatgaggcaatacacttgggacaaacatctggagacttgggtcaagacttcagggctccttggaggacccaagaactcaactcccacagtgatatcgccgcagcaatacaagaaaagattcaggaaagcgatgacggcttattttctgatggttcctgaccagtggtcgcctgccgcggttgtgccaagcaacagttcttcagcagaggtgaaggaggaagaagagaaagacaatcctcaagctgttggtaacaagtcctga

SEQ ID NO: 32049 - protein, 1757 aa, Arabidopsis thaliana
  misc_feature (1)..(1757): Ceres Seq. ID no. 13592044
MDSQDHKAPGFVDIVKSWIPRKSESSNMSRDFWMPDQSCPVCYECDAQFTVFNRRHHCRLCGRVFCAKCAANSIPSPSDETKDSHEEPERIRVCNYCYKQWEQGIVPPDNGASIISLHFSSSPSARSVASTTSNSSNCTIDSTAGPSPRPKMNPRASRRVSSNMDSEKSEQQNAKSRRSSDHYGHVLDSSDNQVEFFVNSSGRSDGEADDDDDYQSDFAQSYAQGNDYYGAINLDEVDHIYGSHEAHDVGVKIEPNISGFPPDQDLDSLNTETIDKTRHQENGWTDVKEGSPPCEESFEPEVVDFESDGLLWLPPEPENEEDEREAVLSDDDGDEGDRGDWGYLRPSNSFNEKDFHSKDKSSGAMKNVVEGHFRALVAQLLEVDNLPMVNEGDEEGWLDIITSLSWEAATLLKPDTSKSGGMDPGGYVKVKCIPCGRRSESMVVKGVVCKKNVAHRRMTSKIEKPRLLILGGALEYQRISNQLSSFDTLLQQEMDHLKMAVAKIDSHNPDILLVEKSVSRFAQEYLLAKDISLVLNIKRSLLERISRCTGAQIVPSIDQLTSPKLGYCDLFHVEKFVETHVSPCQVAKKMAKTLMFFDGCPKPLGCTILLKGAHEDELKKVKHVIQYGVFAAYHLALETSFLADEGASIHELPLQTPITVALPDKPSMVNRSISTIPGFTVSSAEKSPTTELRGEPHKANGDLTGNFTSSKTHFQGKLDGNDRIDPSERLLHNLDTVYCKPPETITSKDDGLVPTLESRQLSFHVEEPSVQKDQWSVLSGATEQVTDGGYTNDSAVIGNQNFNRQEQMESSKGDFHPSASDHQSILVSLSTRCVWKGSVCERAHLLRIKYYGSFDKPLGRFLRDNLFDQDQCCPSCTMPAEAHIHCYTHRQGSLTISVKKLPELLPGQREGKIWMWHRCLKCPRINGFPPATRRIVMSDAAWGLSFGKFLELSFSNHAAASRVANCGHSLHRDCLRFYGFGRMVACFRYASINIYAVTLPPAKLYFNYENQEWLQKESKEVIKKAEVLFNEVQEALSQISAKTMGAGSKGSTPNKIKLSLEELAGLLEQRKKEYKDSLQQMLNVVKDGQPTIDILLINKLRRLIIFDSYAWDECLAGAANMVRNNYLEAPKNSAPKVMGRNVSLEKLSDEKVKSIPTHVAICNDSLLQDADYETCLNQGKSFADTSGKFAIPEDVGSDRPPDCRMEFDPSEGGKDNFVESSQVVKPAHTESQFQATDLSDTLDAAWIGEQTTSENGIFRPPSRAASTNGTQIPDLRLLGSESELNFKGGPTNDEHTTQVQLPSPSFYYSLNKNYSLNSRKHIMAEDRPVYVSSYRELEWRSGARLLLPLGCNDLVLPVYDDEPTSIIAYALTSSEYKAQMSGSDKSRDRLDSGGSFSLFDSVNLLSLNSLSDLSVDMSRSLSSADEQVSQLLHSSLYLKDLHARISFTDEGPPGKVKYSVTCYYAKEFEALRMICCPSETDFIRSLGRCRKWGAQGGKSNVFFAKSLDDRFIIKQVTKTELESFIKFGPAYFKYLTESISTKSPTSLAKILGIYQVSSKHLKGGKEFKMDVLVMENLLFKRNFTRLYDLKGSTRARYNPDTSGSNTVLLDQNLVEAMPTSPIFVGSKAKRLLERAVWNDTSFLASIHVMDYSLLVGVDEERNELVLGIIDFMRQYTWDKHLETWVKTSGLLGGPKNSTPTVISPQQYKKRFRKAMTAYFLMVPDQWSPAAVVPSNSSSAEVKEEEEKDNPQAVGNKS

SEQ ID NO: 32050 - protein, 1730 aa, Arabidopsis thaliana
  misc_feature (1)..(1730): Ceres Seq. ID no. 13592045
MSRDFWMPDQSCPVCYECDAQFTVFNRRHHCRLCGRVFCAKCAANSIPSPSDETKDSHEEPERIRVCNYCYKQWEQGIVPPDNGASIISLHFSSSPSARSVASTTSNSSNCTIDSTAGPSPRPKMNPRASRRVSSNMDSEKSEQQNAKSRRSSDHYGHVLDSSDNQVEFFVNSSGRSDGEADDDDDYQSDFAQSYAQGNDYYGAINLDEVDHIYGSHEAHDVGVKIEPNISGFPPDQDLDSLNTETIDKTRHQENGWTDVKEGSPPCEESFEPEVVDFESDGLLWLPPEPENEEDEREAVLSDDDGDEGDRGDWGYLRPSNSFNEKDFHSKDKSSGAMKNVVEGHFRALVAQLLEVDNLPMVNEGDEEGWLDIITSLSWEAATLLKPDTSKSGGMDPGGYVKVKCIPCGRRSESMVVKGVVCKKNVAHRRMTSKIEKPRLLILGGALEYQRISNQLSSFDTLLQQEMDHLKMAVAKIDSHNPDILLVEKSVSRFAQEYLLAKDISLVLNIKRSLLERISRCTGAQIVPSIDQLTSPKLGYCDLFHVEKFVETHVSPCQVAKKMAKTLMFFDGCPKPLGCTILLKGAHEDELKKVKHVIQYGVFAAYHLALETSFLADEGASIHELPLQTPITVALPDKPSMVNRSISTIPGFTVSSAEKSPTTELRGEPHKANGDLTGNFTSSKTHFQGKLDGNDRIDPSERLLHNLDTVYCKPPETITSKDDGLVPTLESRQLSFHVEEPSVQKDQWSVLSGATEQVTDGGYTNDSAVIGNQNFNRQEQMESSKGDFHPSASDHQSILVSLSTRCVWKGSVCERAHLLRIKYYGSFDKPLGRFLRDNLFDQDQCCPSCTMPAEAHIHCYTHRQGSLTISVKKLPELLPGQREGKIWMWHRCLKCPRINGFPPATRRIVMSDAAWGLSFGKFLELSFSNHAAASRVANCGHSLHRDCLRFYGFGRMVACFRYASINIYAVTLPPAKLYFNYENQEWLQKESKEVIKKAEVLFNEVQEALSQISAKTMGAGSKGSTPNKIKLSLEELAGLLEQRKKEYKDSLQQMLNVVKDGQPTIDILLINKLRRLIIFDSYAWDECLAGAANMVRNNYLEAPKNSAPKVMGRNVSLEKLSDEKVKSIPTHVAICNDSLLQDADYETCLNQGKSFADTSGKFAIPEDVGSDRPPDCRMEFDPSEGGKDNFVESSQVVKPAHTESQFQATDLSDTLDAAWIGEQTTSENGIFRPPSRAASTNGTQIPDLRLLGSESELNFKGGPTNDEHTTQVQLPSPSFYYSLNKNYSLNSRKHIMAEDRPVYVSSYRELEWRSGARLLLPLGCNDLVLPVYDDEPTSIIAYALTSSEYKAQMSGSDKSRDRLDSGGSFSLFDSVNLLSLNSLSDLSVDMSRSLSSADEQVSQLLHSSLYLKDLHARISFTDEGPPGKVKYSVTCYYAKEFEALRMICCPSETDFIRSLGRCRKWGAQGGKSNVFFAKSLDDRFIIKQVTKTELESFIKFGPAYFKYLTESISTKSPTSLAKILGIYQVSSKHLKGGKEFKMDVLVMENLLFKRNFTRLYDLKGSTRARYNPDTSGSNTVLLDQNLVEAMPTSPIFVGSKAKRLLERAVWNDTSFLASIHVMDYSLLVGVDEERNELVLGIIDFMRQYTWDKHLETWVKTSGLLGGPKNSTPTVISPQQYKKRFRKAMTAYFLMVPDQWSPAAVVPSNSSSAEVKEEEEKDNPQAVGNKS

SEQ ID NO: 32051 - protein, 1724 aa, Arabidopsis thaliana
  misc_feature (1)..(1724): Ceres Seq. ID no. 13592046
MPDQSCPVCYECDAQFTVFNRRHHCRLCGRVFCAKCAANSIPSPSDETKDSHEEPERIRVCNYCYKQWEQGIVPPDNGASIISLHFSSSPSARSVASTTSNSSNCTIDSTAGPSPRPKMNPRASRRVSSNMDSEKSEQQNAKSRRSSDHYGHVLDSSDNQVEFFVNSSGRSDGEADDDDDYQSDFAQSYAQGNDYYGAINLDEVDHIYGSHEAHDVGVKIEPNISGFPPDQDLDSLNTETIDKTRHQENGWTDVKEGSPPCEESFEPEVVDFESDGLLWLPPEPENEEDEREAVLSDDDGDEGDRGDWGYLRPSNSFNEKDFHSKDKSSGAMKNVVEGHFRALVAQLLEVDNLPMVNEGDEEGWLDIITSLSWEAATLLKPDTSKSGGMDPGGYVKVKCIPCGRRSESMVVKGVVCKKNVAHRRMTSKIEKPRLLILGGALEYQRISNQLSSFDTLLQQEMDHLKMAVAKIDSHNPDILLVEKSVSRFAQEYLLAKDISLVLNIKRSLLERISRCTGAQIVPSIDQLTSPKLGYCDLFHVEKFVETHVSPCQVAKKMAKTLMFFDGCPKPLGCTILLKGAHEDELKKVKHVIQYGVFAAYHLALETSFLADEGASIHELPLQTPITVALPDKPSMVNRSISTIPGFTVSSAEKSPTTELRGEPHKANGDLTGNFTSSKTHFQGKLDGNDRIDPSERLLHNLDTVYCKPPETITSKDDGLVPTLESRQLSFHVEEPSVQKDQWSVLSGATEQVTDGGYTNDSAVIGNQNFNRQEQMESSKGDFHPSASDHQSILVSLSTRCVWKGSVCERAHLLRIKYYGSFDKPLGRFLRDNLFDQDQCCPSCTMPAEAHIHCYTHRQGSLTISVKKLPELLPGQREGKIWMWHRCLKCPRINGFPPATRRIVMSDAAWGLSFGKFLELSFSNHAAASRVANCGHSLHRDCLRFYGFGRMVACFRYASINIYAVTLPPAKLYFNYENQEWLQKESKEVIKKAEVLFNEVQEALSQISAKTMGAGSKGSTPNKIKLSLEELAGLLEQRKKEYKDSLQQMLNVVKDGQPTIDILLINKLRRLIIFDSYAWDECLAGAANMVRNNYLEAPKNSAPKVMGRNVSLEKLSDEKVKSIPTHVAICNDSLLQDADYETCLNQGKSFADTSGKFAIPEDVGSDRPPDCRMEFDPSEGGKDNFVESSQVVKPAHTESQFQATDLSDTLDAAWIGEQTTSENGIFRPPSRAASTNGTQIPDLRLLGSESELNFKGGPTNDEHTTQVQLPSPSFYYSLNKNYSLNSRKHIMAEDRPVYVSSYRELEWRSGARLLLPLGCNDLVLPVYDDEPTSIIAYALTSSEYKAQMSGSDKSRDRLDSGGSFSLFDSVNLLSLNSLSDLSVDMSRSLSSADEQVSQLLHSSLYLKDLHARISFTDEGPPGKVKYSVTCYYAKEFEALRMICCPSETDFIRSLGRCRKWGAQGGKSNVFFAKSLDDRFIIKQVTKTELESFIKFGPAYFKYLTESISTKSPTSLAKILGIYQVSSKHLKGGKEFKMDVLVMENLLFKRNFTRLYDLKGSTRARYNPDTSGSNTVLLDQNLVEAMPTSPIFVGSKAKRLLERAVWNDTSFLASIHVMDYSLLVGVDEERNELVLGIIDFMRQYTWDKHLETWVKTSGLLGGPKNSTPTVISPQQYKKRFRKAMTAYFLMVPDQWSPAAVVPSNSSSAEVKEEEEKDNPQAVGNKS

SEQ ID NO: 32052 - DNA, 1322 bp, Arabidopsis thaliana
  misc_feature (1)..(1322): Ceres Seq. ID no. 13592047
ttcgttaagctctttcatactctgttccatctctctctctctttctcactgatctcatttcattccttatctttccaattttaccctcacgttaccttcgaattctccatctcctaccattcaaagcttctctcagatgtctatagtctctaagcttcgttctccggttaaaccaatagatgagtcacgagctatcctctgttcgaccgggaacagatttaaggttacgaaaacagaaatgacgaagaagccacaactgaatccacgagtgacgaaatctccggcgacgaagaagcccgattccaatttctcagtttcgactgatgattcctcttcttcttcttcatcctcggaacgttcgtcagtgaacacgacaaactctgggaaagtaaccactccgtcgaaacggaacggagttgagaagctcaataatgtcgttgcctccgtcgccgtcgttgaagacattagtcctaaaattccgggaccggtcaagagatgccactggatcacacctaattcagacccgatctatgttttgttccacgacgaggaatggggtgttccagttcgtgatgacaagaaactcttcgagctacttgtcttctcacaagctttggctgagtttagctggccttcaatcctacgcagaagagacgactttaggaagctctttgaagagtttgatccttcagctatagcacaattcacagagaagaggttgatgtctcttagagttaatgggtgtctaattctatccgaacagaaactgcgagcaattgtagagaacgcgaaatctgttctcaaggtcaagcaggaatttggatcgttcagtaattattgttggagatttgtgaaccacaagccattaagaaatggctatcgatatggtcgtcaagtaccggttaagtccccaaaggcagagtacattagcaaagatatgatgcagagagggtttcgctgcgttggtcctactgttatgtattccttcttgcaggcctctggcattgttaatgatcatctcacagcttgtttcagataccaagaatgtaatgttgagactgagagagaaacaaaaagccatgagactgaaaccaaactggatctgcattctccattacttgtttgatcagaaacagggattggactattaagaagatgagtgaccagtgtttgtattcgttatggaatgtaccatttgtagctagctgtgttcattgattatgctactatcctagctagctttgtctaactagatatttgatgatgtgttagtgtttgaccaaaagattgattgcagggaaataaagaatttaacattttgt

SEQ ID NO: 32053 - protein, 329 aa, Arabidopsis thaliana
  misc_feature (1)..(329): Ceres Seq. ID no. 13592048
MSIVSKLRSPVKPIDESRAILCSTGNRFKVTKTEMTKKPQLNPRVTKSPATKKPDSNFSVSTDDSSSSSSSSERSSVNTTNSGKVTTPSKRNGVEKLNNVVASVAVVEDISPKIPGPVKRCHWITPNSDPIYVLFHDEEWGVPVRDDKKLFELLVFSQALAEFSWPSILRRRDDFRKLFEEFDPSAIAQFTEKRLMSLRVNGCLILSEQKLRAIVENAKSVLKVKQEFGSFSNYCWRFVNHKPLRNGYRYGRQVPVKSPKAEYISKDMMQRGFRCVGPTVMYSFLQASGIVNDHLTACFRYQECNVETERETKSHETETKLDLHSPLLV

SEQ ID NO: 32054 - protein, 295 aa, Arabidopsis thaliana
  misc_feature (1)..(295): Ceres Seq. ID no. 13592049
MTKKPQLNPRVTKSPATKKPDSNFSVSTDDSSSSSSSSERSSVNTTNSGKVTTPSKRNGVEKLNNVVASVAVVEDISPKIPGPVKRCHWITPNSDPIYVLFHDEEWGVPVRDDKKLFELLVFSQALAEFSWPSILRRRDDFRKLFEEFDPSAIAQFTEKRLMSLRVNGCLILSEQKLRAIVENAKSVLKVKQEFGSFSNYCWRFVNHKPLRNGYRYGRQVPVKSPKAEYISKDMMQRGFRCVGPTVMYSFLQASGIVNDHLTACFRYQECNVETERETKSHETETKLDLHSPLLV

SEQ ID NO: 32055 - DNA, 1913 bp, Arabidopsis thaliana
  misc_feature (1)..(1913): Ceres Seq. ID no. 13592068
atggcttcttcgaaactccatcatcatcctcaccgcagaaaatccccaatacgttgcttctgtctcttaatcataaccatgtcctccattctcatccttctcttctctctcttcctcttctcctctccctcctcctcctcccgtcaccaccaccaccacaattccggcgacacttctccggtcaatccttcgtcgtctctcgccgctcagatccgtctcgcttgtaacgcaactcgttacccagaccaatgcgtctcttccctatccgaacagggtcgggttcctccggatcctaaaccaatccagatcattcactcagcgatctcattctcattccaaaacctcaaaaccgcccaatcaaaaatcaagtctattgtagactcgtccgtagggaatctaaaccgtacaaacgccgcgaacacgtgtctccagcttctcacttactccgagcaccgcactcaatcgacggatcaagctttaacacgtggcaaaatcaaagacgctcgagcttggatgagcgctgctctagtgtaccagtacgattcatggtcagcgctcaagtacgtcaacgacacgagccaagtaggtgaaacgatgtcgtttctcgacggacttatccacgtcaccagcaacgcgcttagcatgatggtatcgtacgataacttcggagacaacgtcgcgtcgtggacttacccagcaacggaacgtgacgggttttgggaaaagactgggcctggtttgggcttagatccgagtacagggcttaatttgggttttccttccggtttaaaagaagacgtgacggtgtgtaaagacggaaaatgcggttacaagacggtgcaagacgccgttaacgctgcgccggaggataacggaatgcgtaagttcgttataaagattagcgaaggagtctacgaggagaacgttattgttccgtttgagaagaagaacgttgtgtttatcggtgacggtatgggcaaaacggtcattacaggttcgttaaacgccggtatgcctgggatcactacgtacaatactgcaactgtcggagtggtaggagatggattcatggctcgtgatctaacgttccagaacacggcgggaccagacgctcaccaagcggtggcgtttagatccgacagcgatttttctctgatcgagaattgcgagttccttgggaaccaagacactctctatgcccatggtcttcgtcagttctacaaaaactgtcgtatccaaggaaatgttgactttatctttgggaattcagctgctgtcttccaagactgtgaaatcctaatcgcaccgcgtcaaattaaccctgaaaagggcgagaaaaacgcagtcactgcccaaggaaggattgacccgtcccagtccacgggtttcgtgttcttgaactgtttgattaacggaacagaggagtacatgaagctgtttaaagctaaccctaaggtgcataagaacttcttggggaggccatggaaagattactcaaggactgtgtttataggttgtaatttagaggctttgattactcctgatggatggttaccttggagcggggatttcgcgctcaagacactttattacggtgaatctaagaacacgggtccgggatcagataggtcacaaagggtttcatggagcagtcagataccggacgagcatgttcatgtgtattcggtggctaactttattcaggctgatgagtgggcttcgatgtctgcttaaatcaatctttaagactataaggggtttaggaatgttttaaaagaagaaaaccatctcattgtaatttagttgataaactgttttaaacataaaagcaaacattgcattcatgttatatcaattgagagttcatagtcttaggactaattgaagtaaaacaataaagtttcaaaacttgg

SEQ ID NO: 32056 - protein, 577 aa, Arabidopsis thaliana
  misc_feature (1)..(577): Ceres Seq. ID no. 13592069
MASSKLHHHPHRRKSPIRCFCLLIITMSSILILLFSLFLFSSPSSSSRHHHHHNSGDTSPVNPSSSLAAQIRLACNATRYPDQCVSSLSEQGRVPPDPKPIQIIHSAISFSFQNLKTAQSKIKSIVDSSVGNLNRTNAANTCLQLLTYSEHRTQSTDQALTRGKIKDARAWMSAALVYQYDSWSALKYVNDTSQVGETMSFLDGLIHVTSNALSMMVSYDNFGDNVASWTYPATERDGFWEKTGPGLGLDPSTGLNLGFPSGLKEDVTVCKDGKCGYKTVQDAVNAAPEDNGMRKFVIKISEGVYEENVIVPFEKKNVVFIGDGMGKTVITGSLNAGMPGITTYNTATVGVVGDGFMARDLTFQNTAGPDAHQAVAFRSDSDFSLIENCEFLGNQDTLYAHGLRQFYKNCRIQGNVDFIFGNSAAVFQDCEILIAPRQINPEKGEKNAVTAQGRIDPSQSTGFVFLNCLINGTEEYMKLFKANPKVHKNFLGRPWKDYSRTVFIGCNLEALITPDGWLPWSGDFALKTLYYGESKNTGPGSDRSQRVSWSSQIPDEHVHVYSVANFIQADEWASMSA

SEQ ID NO: 32057 - protein, 551 aa, Arabidopsis thaliana
  misc_feature (1)..(551): Ceres Seq. ID no. 13592070
MSSILILLFSLFLFSSPSSSSRHHHHHNSGDTSPVNPSSSLAAQIRLACNATRYPDQCVSSLSEQGRVPPDPKPIQIIHSAISFSFQNLKTAQSKIKSIVDSSVGNLNRTNAANTCLQLLTYSEHRTQSTDQALTRGKIKDARAWMSAALVYQYDSWSALKYVNDTSQVGETMSFLDGLIHVTSNALSMMVSYDNFGDNVASWTYPATERDGFWEKTGPGLGLDPSTGLNLGFPSGLKEDVTVCKDGKCGYKTVQDAVNAAPEDNGMRKFVIKISEGVYEENVIVPFEKKNVVFIGDGMGKTVITGSLNAGMPGITTYNTATVGVVGDGFMARDLTFQNTAGPDAHQAVAFRSDSDFSLIENCEFLGNQDTLYAHGLRQFYKNCRIQGNVDFIFGNSAAVFQDCEILIAPRQINPEKGEKNAVTAQGRIDPSQSTGFVFLNCLINGTEEYMKLFKANPKVHKNFLGRPWKDYSRTVFIGCNLEALITPDGWLPWSGDFALKTLYYGESKNTGPGSDRSQRVSWSSQIPDEHVHVYSVANFIQADEWASMSA

SEQ ID NO: 32058 - protein, 406 aa, Arabidopsis thaliana
  misc_feature (1)..(406): Ceres Seq. ID no. 13592071
MSAALVYQYDSWSALKYVNDTSQVGETMSFLDGLIHVTSNALSMMVSYDNFGDNVASWTYPATERDGFWEKTGPGLGLDPSTGLNLGFPSGLKEDVTVCKDGKCGYKTVQDAVNAAPEDNGMRKFVIKISEGVYEENVIVPFEKKNVVFIGDGMGKTVITGSLNAGMPGITTYNTATVGVVGDGFMARDLTFQNTAGPDAHQAVAFRSDSDFSLIENCEFLGNQDTLYAHGLRQFYKNCRIQGNVDFIFGNSAAVFQDCEILIAPRQINPEKGEKNAVTAQGRIDPSQSTGFVFLNCLINGTEEYMKLFKANPKVHKNFLGRPWKDYSRTVFIGCNLEALITPDGWLPWSGDFALKTLYYGESKNTGPGSDRSQRVSWSSQIPDEHVHVYSVANFIQADEWASMSA

SEQ ID NO: 32059 - DNA, 2820 bp, Arabidopsis thaliana
  misc_feature (1)..(2820): Ceres Seq. ID no. 13592072
atgctccatctcttcctcttctcctccgccgcctccaccaccaccgccgtagaagacaattccaccaccatgcccccttcttctagatccgccgctaatcaaaactcctcctcttctctccatctctgcaaacattcaccgtcggcgactctcgacctcttaatcctaatcctcgtcctcttctccggcacattcctcctctcctcttacttctcataccttatccactccttatctctcctctcctctcatttcccttcaatcaccatctccctctcctctctcctccctcctctaatcatcttcttctcctccgatcacagcaccgaagatgaagatcatcatcatccctcaggaaaaatccctcctccggcttcgttcttcttcgcattcgcagtttttttcgcggcttcaattgcgtttctcgacctgtgttgtggttcaagatcaaggaaatgtcgtaaccctaagtgtaaaggaatgaagaaagctatggagtttgatttgcagttacagacagaggaatgtgttaaatccggttcggttaaagagattgatcggttaccgtggaaaggaggtagtgagagtaatcctgattatgagtgtttgagagctgagctgaggaagatggctccggttaatggtcgagctgttttgattttccgatcaaaatgtggttgccctattgctaagcttgaaggttggggacctaagagaagtcggcgtcataaaaaatggaacttggtgactagtgaatttgtaggttctgtttatcctgttcttgcgacgtatttattgccattgatcattttgagaccagcgagatgcttctctgctccgagtcggacccacttcgatttctccggcgaaagctccgatactgaacgagctctcgtctctgctcttggatcgtgcgcttccagtaatgacgtcacttgtggtagacagattcattgccgtgtcttgaaatccggtcttgattctaatggatacatatgtaatagcgttcttaacatgtacgctaaatgccgtctcttggctgatgcggaatctgttttcagggatcacgcgaagcttgattctgcttcgttcaatattatggttgatgggtatgttagatctcgtagactttgggatgcgcttaagttgttcgacgtaatgcctgagagaagctgtgtctcgtatactactttgataaagggttatgctcaaaacaatcagtggagtgaagctatggagctttttagggagatgagaaatttgggaattatgctaaatgaagttactttagccactgttatatctgcttgctcacatttgggtgggatttgggattgtaggatgttgcagagtttggctattaaactcaagcttgaaggtcgtgtttttgtttcgacgaatttgctgcatatgtactgtctttgtttgtgtttgaaggatgctcggaagttgtttgatgaaatgcctgagagaaatttagttacttggaacgtgatgttaaatgggtactcaaaagctggacttattgaacaggctgaggaattgtttgatcagattactgagaaagatattgtctcgtggggtacaatgattgatgggtgtctccgaaagaatcagcttgacgaagctcttgtttactacaccgagatgctgcgctgtggaatgaagcctagtgaagttatgatggtggaccttctctcggcttcagctcgatcagttggtagctccaagggtttgcaacttcatggtaccattgtgaaaaggggttttgattgttatgatttcttacaagcaacgatcatacatttctacgctgtctctaatgacataaaactcgctcttcagcagtttgaagcgagtgttaaggaccacattgcgtcgagaaacgcgttgattgcaggatttgtgaagaatggaatggttgagcaggcaagagaagtatttgatcagactcatgataaagacatcttttcatggaacgctatgatatcgggttacgcgcaaagtctatcgcctcagttagctctacatctattccgcgaaatgatcagtagtagccaagtaaaaccagatgcaatcacaatggttagtgttttttctgcaatttcttctctaggatcgttggaagaagggaagagagcacatgattatctaaactttagcacgattcctcccaacgacaatctaaccgctgctataatcgacatgtacgccaaatgtggaagcatcgaaactgctctaaacattttccaccaaacaaagaacatttcttcttctacaatctctccctggaacgccatcatttgcggctcagcgacacatggccatgcaaaactagcgcttgatctctactccgatctccaatctctccccatcaaaccgaacagcatcacttttgtcggtgtcttgagcgcatgctgccatgcagggctagtggagttaggtaaaacgtatttcgaaagcatgaagagcgatcacgggatcgagccagacatcaaacattatggatgtatggttgatttattggggaaagctgggagattagaggaagctaaagaaatgatcaagaagatgcctgtaaaggctgatgtaatgatctgggggatgttattatcagcttcacgaactcacgggaacgtcgagatcgccgaacttgcggctactgagctagcagcgattgatccatctcatggaggatgcaaagttatgctttcgaacgtttatgcagacgcagggagatgggaagatgtagctttggttagagaagagatgcgaacgagagatgttgagtggtcacgtgccttcagtggtgttgtgtga

SEQ ID NO: 32060 - protein, 939 aa, Arabidopsis thaliana
  misc_feature (1)..(939): Ceres Seq. ID no. 13592073
MLHLFLFSSAASTTTAVEDNSTTMPPSSRSAANQNSSSSLHLCKHSPSATLDLLILILVLFSGTFLLSSYFSYLIHSLSLLSSHFPSITISLSSLLPPLIIFFSSDHSTEDEDHHHPSGKIPPPASFFFAFAVFFAASIAFLDLCCGSRSRKCRNPKCKGMKKAMEFDLQLQTEECVKSGSVKEIDRLPWKGGSESNPDYECLRAELRKMAPVNGRAVLIFRSKCGCPIAKLEGWGPKRSRRHKKWNLVTSEFVGSVYPVLATYLLPLIILRPARCFSAPSRTHFDFSGESSDTERALVSALGSCASSNDVTCGRQIHCRVLKSGLDSNGYICNSVLNMYAKCRLLADAESVFRDHAKLDSASFNIMVDGYVRSRRLWDALKLFDVMPERSCVSYTTLIKGYAQNNQWSEAMELFREMRNLGIMLNEVTLATVISACSHLGGIWDCRMLQSLAIKLKLEGRVFVSTNLLHMYCLCLCLKDARKLFDEMPERNLVTWNVMLNGYSKAGLIEQAEELFDQITEKDIVSWGTMIDGCLRKNQLDEALVYYTEMLRCGMKPSEVMMVDLLSASARSVGSSKGLQLHGTIVKRGFDCYDFLQATIIHFYAVSNDIKLALQQFEASVKDHIASRNALIAGFVKNGMVEQAREVFDQTHDKDIFSWNAMISGYAQSLSPQLALHLFREMISSSQVKPDAITMVSVFSAISSLGSLEEGKRAHDYLNFSTIPPNDNLTAAIIDMYAKCGSIETALNIFHQTKNISSSTISPWNAIICGSATHGHAKLALDLYSDLQSLPIKPNSITFVGVLSACCHAGLVELGKTYFESMKSDHGIEPDIKHYGCMVDLLGKAGRLEEAKEMIKKMPVKADVMIWGMLLSASRTHGNVEIAELAATELAAIDPSHGGCKVMLSNVYADAGRWEDVALVREEMRTRDVEWSRAFSGVV

SEQ ID NO: 32061 - protein, 916 aa, Arabidopsis thaliana
  misc_feature (1)..(916): Ceres Seq. ID no. 13592074
MPPSSRSAANQNSSSSLHLCKHSPSATLDLLILILVLFSGTFLLSSYFSYLIHSLSLLSSHFPSITISLSSLLPPLIIFFSSDHSTEDEDHHHPSGKIPPPASFFFAFAVFFAASIAFLDLCCGSRSRKCRNPKCKGMKKAMEFDLQLQTEECVKSGSVKEIDRLPWKGGSESNPDYECLRAELRKMAPVNGRAVLIFRSKCGCPIAKLEGWGPKRSRRHKKWNLVTSEFVGSVYPVLATYLLPLIILRPARCFSAPSRTHFDFSGESSDTERALVSALGSCASSNDVTCGRQIHCRVLKSGLDSNGYICNSVLNMYAKCRLLADAESVFRDHAKLDSASFNIMVDGYVRSRRLWDALKLFDVMPERSCVSYTTLIKGYAQNNQWSEAMELFREMRNLGIMLNEVTLATVISACSHLGGIWDCRMLQSLAIKLKLEGRVFVSTNLLHMYCLCLCLKDARKLFDEMPERNLVTWNVMLNGYSKAGLIEQAEELFDQITEKDIVSWGTMIDGCLRKNQLDEALVYYTEMLRCGMKPSEVMMVDLLSASARSVGSSKGLQLHGTIVKRGFDCYDFLQATIIHFYAVSNDIKLALQQFEASVKDHIASRNALIAGFVKNGMVEQAREVFDQTHDKDIFSWNAMISGYAQSLSPQLALHLFREMISSSQVKPDAITMVSVFSAISSLGSLEEGKRAHDYLNFSTIPPNDNLTAAIIDMYAKCGSIETALNIFHQTKNISSSTISPWNAIICGSATHGHAKLALDLYSDLQSLPIKPNSITFVGVLSACCHAGLVELGKTYFESMKSDHGIEPDIKHYGCMVDLLGKAGRLEEAKEMIKKMPVKADVMIWGMLLSASRTHGNVEIAELAATELAAIDPSHGGCKVMLSNVYADAGRWEDVALVREEMRTRDVEWSRAFSGVV

SEQ ID NO: 32062 - protein, 779 aa, Arabidopsis thaliana
  misc_feature (1)..(779): Ceres Seq. ID no. 13592075
MKKAMEFDLQLQTEECVKSGSVKEIDRLPWKGGSESNPDYECLRAELRKMAPVNGRAVLIFRSKCGCPIAKLEGWGPKRSRRHKKWNLVTSEFVGSVYPVLATYLLPLIILRPARCFSAPSRTHFDFSGESSDTERALVSALGSCASSNDVTCGRQIHCRVLKSGLDSNGYICNSVLNMYAKCRLLADAESVFRDHAKLDSASFNIMVDGYVRSRRLWDALKLFDVMPERSCVSYTTLIKGYAQNNQWSEAMELFREMRNLGIMLNEVTLATVISACSHLGGIWDCRMLQSLAIKLKLEGRVFVSTNLLHMYCLCLCLKDARKLFDEMPERNLVTWNVMLNGYSKAGLIEQAEELFDQITEKDIVSWGTMIDGCLRKNQLDEALVYYTEMLRCGMKPSEVMMVDLLSASARSVGSSKGLQLHGTIVKRGFDCYDFLQATIIHFYAVSNDIKLALQQFEASVKDHIASRNALIAGFVKNGMVEQAREVFDQTHDKDIFSWNAMISGYAQSLSPQLALHLFREMISSSQVKPDAITMVSVFSAISSLGSLEEGKRAHDYLNFSTIPPNDNLTAAIIDMYAKCGSIETALNIFHQTKNISSSTISPWNAIICGSATHGHAKLALDLYSDLQSLPIKPNSITFVGVLSACCHAGLVELGKTYFESMKSDHGIEPDIKHYGCMVDLLGKAGRLEEAKEMIKKMPVKADVMIWGMLLSASRTHGNVEIAELAATELAAIDPSHGGCKVMLSNVYADAGRWEDVALVREEMRTRDVEWSRAFSGVV

SEQ ID NO: 32063 - DNA, 2323 bp, Arabidopsis thaliana
  misc_feature (1)..(2323): Ceres Seq. ID no. 13592080
gaatttagttaaggatgaggaagatgaagatgatgatgattcgaaaatgaaggtggtggatactgcaaatggctgctgagtgctgagacactctcgaaccccacaaaccctaaggatctcctccgaagatttccactattactggaagtgatatagatacgttgcaacaaagaagaccacacaaaaacgttattgagcagccgtgaaatcgatttaccaattgaagcttccccccatgatttgactttccctgatgctcgtttgtgggaaagggtttctaaagtgcagagcacctggagttccattcttttgtgacaaaagaaaatccttcttcactaaaactaagaggggctttcacagtttacctttgggcactggggtccgtgtttatttcaacaacaatcttaggtactcaagcaattcaatagaagttgtggagaaagctgccattaatatgggttcaaaggaagacaaggcagataatccagctttatcttcatatgatgatgccatggaagctctgtcgactcttatttctcgtcgaaaccgtggggatcgcacacctactaaaggaaatcgtgacaagcttgaacaagtcgtcacatatctcaagattttggacctggaagacaaaataaaagaactaaaagttattcatgtcgcaggaacaaaaggaaagggttcaacatgtgtcttcagtgaggcaattttacgtaattgtgggtttcgaaccggaatgtttacatctcctcacttgattgatgtgagggaaagattccgaatagatggcttggatatatctgaggaaaagtttctacagtacttctgggaatgttggaagttattgaaggagaaagctgtagatggtcttaccatgcctcctctttttcagtttctcacagtattggcatttaagatttttgtttgtgaaaaggttgatgttgctgtcattgaagttggacttgggggaaaacttgactcgacaaatgtgattcaaaaacctgttgtctgtggcattgcttctcttgggatggatcatatggacatattgggaaatacgctagctgatattgcctttcataaggctgggattttcaagcctcaaatccccgccttcacagtaccacaactctctgaagcaatggatgttcttcagaaaacagctaataatctcgaggttcctctagaagtagtagcgcctcttgaacctaaaaagttggacggagttacgcttggcttgtctggggatcatcagctagtaaatgcaggtcttgctgtttctctttcaagatgctggcttcaaagaaccgggaattggaagaagatatttccaaatgaaagcaaggaaactgagattcccgtggcattttgtcgtggtcttgcaacggcacgtcttcatgggagagctcaagttgttcatgatgtagtttcagatccgcaggactcatcagactcgatggaaactccatgcggtgatctgatcttttacttggatggtgctcacagtccagagagcatggaggcttgtggtcgatggttctcttctgcagtcagaggagacaaaagcttatccactgctgtcaatggttacatgagacatggggagtatggtacagacttaaacagagtctccaaacagattcttctgttcaactgcatggaagtgagagaccctcaagtcttacttccaaagctggtcaccacttgcgcttcctcaggcactcatttctcaagagcgctttttgtcccgagcatgtctacttacaacaaagtcatttcgggtgcatcagcgattccttcagatacacgtagaaaggatttgacttggcaattcagactacaaagactatgggagaaatcaatccaagggactgatgcggggcttgaccatacactgaaacccgatggaataaccgccttaccacctcatgatttcctgtgcggagatgcacctcaatgtggtggacctgcagggacaccggtcacttccagtgccgtaatgccttcacttccattgactataaactggctaagagactgcgtacgccgaaacccttcactgaaactagaggttctggtcacaggatcgctacatcttgttggagatgtgctcaggttgctaaagagatgattttatttttcaccaacaaatcttcaaaaagactccttaagagtaatcttacagagcttcaattgttctttacttcactgtttttttctcatagttactatttgattctttggtccattttatctaacatgagaagtgagaaccctccacttaagctgtatttttctgctaaattttaatttatatttcctc

SEQ ID NO: 32064 - protein, 625 aa, Arabidopsis thaliana
  misc_feature (1)..(625): Ceres Seq. ID no. 13592081
MLVCGKGFLKCRAPGVPFFCDKRKSFFTKTKRGFHSLPLGTGVRVYFNNNLRYSSNSIEVVEKAAINMGSKEDKADNPALSSYDDAMEALSTLISRRNRGDRTPTKGNRDKLEQVVTYLKILDLEDKIKELKVIHVAGTKGKGSTCVFSEAILRNCGFRTGMFTSPHLIDVRERFRIDGLDISEEKFLQYFWECWKLLKEKAVDGLTMPPLFQFLTVLAFKIFVCEKVDVAVIEVGLGGKLDSTNVIQKPVVCGIASLGMDHMDILGNTLADIAFHKAGIFKPQIPAFTVPQLSEAMDVLQKTANNLEVPLEVVAPLEPKKLDGVTLGLSGDHQLVNAGLAVSLSRCWLQRTGNWKKIFPNESKETEIPVAFCRGLATARLHGRAQVVHDVVSDPQDSSDSMETPCGDLIFYLDGAHSPESMEACGRWFSSAVRGDKSLSTAVNGYMRHGEYGTDLNRVSKQILLFNCMEVRDPQVLLPKLVTTCASSGTHFSRALFVPSMSTYNKVISGASAIPSDTRRKDLTWQFRLQRLWEKSIQGTDAGLDHTLKPDGITALPPHDFLCGDAPQCGGPAGTPVTSSAVMPSLPLTINWLRDCVRRNPSLKLEVLVTGSLHLVGDVLRLLKR

SEQ ID NO: 32065 - protein, 558 aa, Arabidopsis thaliana
  misc_feature (1)..(558): Ceres Seq. ID no. 13592082
MGSKEDKADNPALSSYDDAMEALSTLISRRNRGDRTPTKGNRDKLEQVVTYLKILDLEDKIKELKVIHVAGTKGKGSTCVFSEAILRNCGFRTGMFTSPHLIDVRERFRIDGLDISEEKFLQYFWECWKLLKEKAVDGLTMPPLFQFLTVLAFKIFVCEKVDVAVIEVGLGGKLDSTNVIQKPVVCGIASLGMDHMDILGNTLADIAFHKAGIFKPQIPAFTVPQLSEAMDVLQKTANNLEVPLEVVAPLEPKKLDGVTLGLSGDHQLVNAGLAVSLSRCWLQRTGNWKKIFPNESKETEIPVAFCRGLATARLHGRAQVVHDVVSDPQDSSDSMETPCGDLIFYLDGAHSPESMEACGRWFSSAVRGDKSLSTAVNGYMRHGEYGTDLNRVSKQILLFNCMEVRDPQVLLPKLVTTCASSGTHFSRALFVPSMSTYNKVISGASAIPSDTRRKDLTWQFRLQRLWEKSIQGTDAGLDHTLKPDGITALPPHDFLCGDAPQCGGPAGTPVTSSAVMPSLPLTINWLRDCVRRNPSLKLEVLVTGSLHLVGDVLRLLKR

SEQ ID NO: 32066 - protein, 539 aa, Arabidopsis thaliana
  misc_feature (1)..(539): Ceres Seq. ID no. 13592083
MEALSTLISRRNRGDRTPTKGNRDKLEQVVTYLKILDLEDKIKELKVIHVAGTKGKGSTCVFSEAILRNCGFRTGMFTSPHLIDVRERFRIDGLDISEEKFLQYFWECWKLLKEKAVDGLTMPPLFQFLTVLAFKIFVCEKVDVAVIEVGLGGKLDSTNVIQKPVVCGIASLGMDHMDILGNTLADIAFHKAGIFKPQIPAFTVPQLSEAMDVLQKTANNLEVPLEVVAPLEPKKLDGVTLGLSGDHQLVNAGLAVSLSRCWLQRTGNWKKIFPNESKETEIPVAFCRGLATARLHGRAQVVHDVVSDPQDSSDSMETPCGDLIFYLDGAHSPESMEACGRWFSSAVRGDKSLSTAVNGYMRHGEYGTDLNRVSKQILLFNCMEVRDPQVLLPKLVTTCASSGTHFSRALFVPSMSTYNKVISGASAIPSDTRRKDLTWQFRLQRLWEKSIQGTDAGLDHTLKPDGITALPPHDFLCGDAPQCGGPAGTPVTSSAVMPSLPLTINWLRDCVRRNPSLKLEVLVTGSLHLVGDVLRLLKR

SEQ ID NO: 32067 - DNA, 1980 bp, Arabidopsis thaliana
  misc_feature (1)..(1980): Ceres Seq. ID no. 13592092
gattccaaaatcctctgtatatggatctacacctctcctcagtctcatactcaaatcaataatccaaaccccaaaaaaaagaaaaccagagaagagagtttaaaaaatgagaggttcttgcaaagtctctatagttcttcttctggttttaatcaatggtgtgcttggagataacccttatagattcttcacctggaaaattacttatggcgacatttatccccttggtgttaaacaacagggaatattgataaatgggcagtttcctggacctcacattgacgcaatcacaaatgataatatcattatcagtgttttcaattacttgaaagagccttttctcatttcttggaacggagtgcaacagaggaagaactcatggcaagatggagtcgtagggacaacatgtccgattccaccaggcaaaaacttcacttatgtaattcaagtcaaagatcaaattggtagcttctactatttcccttctcttgccttccacaaagccgctggtgcatttggagccatccgtgtctggagtcgtcctcgcatccctgtcccgttctctccccctgacggtgatttctggcttctcgccggagattggtacaaaaccaatcactatgttttgagacgtctactagaagccggaaggaatctaccgaatcctgatggagttctcatcaatggtcgcggctggggaggcaataccttcaccgttcaacccggtaagacctatagattcagaatatcaaacgttggggtcgcgacttcattaaacttcagaatccaaggacacacgatgaagctcgttgaagtagaaggctctcacactgttcaaaacatctacacttcacttgacattcatttaggacagtcttactctgttcttgtgacggctaaccaagctcctcaagactattacatcgtcatctcctcgaggttcacgcggaaagtccttacaacgacttcgattctccattacagtaactcgagaaaaggcgtatctggccctgttccaaatggtcctactttggacatcgcatcttcactctaccaagctcgaactatccggagaaatcttacagcgagtggtccgagaccgaatccgcaaggctcgtatcattacggtttgatcaaaccaggccgtacgatcatactcgccaactcagctccttggatcaacggcaagcaaaggtacgccgtgaacggtgcctcgtttgttgcgcctgacacaccattgaagctcgccgattacttcaagattcccggagtttttaacctcggaagcatcccaacgagtccctctggtggaaacggagggtatcttcaaagctctgttatggccgctaactttagagaattcatcgaggttgttttccaaaactgggaaaattcagtccagtcttggcacgtctccggttactctttcttcgtcgtcggtatggatggaggacaatggactcccggaagccgagcaaagtacaacctgcgggacgcggtttcacggtccaccgttcaagtatatccgagggcatggacagcgatctacatagcgttggataatgttgggatgtggaacataaggtcggagaattgggcaagacagtatttggggcaacaattctatcttcgagtttacacttcctctacttcgtaccgagatgaatatccaccaccaaagaacgctcttatgtgcggacgagctaaaggccgccacactaggccattctaaaagggatattggacgcaacggctcaactgttttttttttctttgtttttttagattgaatgatttgaaatgtttagtattgtcacgagagggtggcaaagagatgtgagcttcgtggatttattcactacggcacaaaaattaggaacaagaaaaatttggagcttgacttgagctttcaacttagtttttatgacgaaatcaaatgttgtgttcttattttaaataatcaaattattttgttttact

SEQ ID NO: 32068 - protein, 541 aa, Arabidopsis thaliana
  misc_feature (1)..(541): Ceres Seq. ID no. 13592093
MRGSCKVSIVLLLVLINGVLGDNPYRFFTWKITYGDIYPLGVKQQGILINGQFPGPHIDAITNDNIIISVFNYLKEPFLISWNGVQQRKNSWQDGVVGTTCPIPPGKNFTYVIQVKDQIGSFYYFPSLAFHKAAGAFGAIRVWSRPRIPVPFSPPDGDFWLLAGDWYKTNHYVLRRLLEAGRNLPNPDGVLINGRGWGGNTFTVQPGKTYRFRISNVGVATSLNFRIQGHTMKLVEVEGSHTVQNIYTSLDIHLGQSYSVLVTANQAPQDYYIVISSRFTRKVLTTTSILHYSNSRKGVSGPVPNGPTLDIASSLYQARTIRRNLTASGPRPNPQGSYHYGLIKPGRTIILANSAPWINGKQRYAVNGASFVAPDTPLKLADYFKIPGVFNLGSIPTSPSGGNGGYLQSSVMAANFREFIEVVFQNWENSVQSWHVSGYSFFVVGMDGGQWTPGSRAKYNLRDAVSRSTVQVYPRAWTAIYIALDNVGMWNIRSENWARQYLGQQFYLRVYTSSTSYRDEYPPPKNALMCGRAKGRHTRPF

SEQ ID NO: 32069 - protein, 310 aa, Arabidopsis thaliana
  misc_feature (1)..(310): Ceres Seq. ID no. 13592094
MKLVEVEGSHTVQNIYTSLDIHLGQSYSVLVTANQAPQDYYIVISSRFTRKVLTTTSILHYSNSRKGVSGPVPNGPTLDIASSLYQARTIRRNLTASGPRPNPQGSYHYGLIKPGRTIILANSAPWINGKQRYAVNGASFVAPDTPLKLADYFKIPGVFNLGSIPTSPSGGNGGYLQSSVMAANFREFIEVVFQNWENSVQSWHVSGYSFFVVGMDGGQWTPGSRAKYNLRDAVSRSTVQVYPRAWTAIYIALDNVGMWNIRSENWARQYLGQQFYLRVYTSSTSYRDEYPPPKNALMCGRAKGRHTRPF

SEQ ID NO: 32070 - DNA, 1370 bp, Arabidopsis thaliana
  misc_feature (1)..(1370): Ceres Seq. ID no. 13592099
gatatttattattcacatttattaacatttttatatctctccctattaaattattttattctctcttagcaacattcatcaaccagagcagattcactatcatcatcttataacacatcttcttcctctaaagtttattttcttaaacttattacaaaaaacatgatcttcaaaagttgatttaatctctttttatccatcttcttcttcatttctcaatatcaaacttttctttttttgtaagcttaacataaaccctaatattttcttgatttttttcaagaaaataaaaacataaagatgcttgaagttagatcaatggatatgactccaaaatcaccagaacccgaatccgaaactccgacccggatccaaccagctaaaccaatctctttcagtaacggaatcatcaaacgccaccaccaccaccaccacaacaacaacaaagtcacttacaaagaatgtctcaagaaccacgcggcggcgattggtggtcacgcgcttgacggttgcggcgaatttatgccgtctccttcgtcaacaccttccgatccaacttctctcaagtgtgcagcttgtggttgtcaccgtaacttccaccgccgtgaaactgacgattcctccgccgttccaccaccgtctcttcttccatcttcaacaacaaccgccgcaattgagtatcagcctcatcaccgtcatcatcctcctcctccgctagctcctccgttaccacgtagtcctaattcatcttctccgccgcctatctcttcctcctacatgcttttagctctctccggtaataataaaaccgcaccgttctcagatctaaacttcgccgccgcggctaaccatctctccgccacgcctggctcgaggaagcgattcaggacgaagtttagctcaaatcagaaagagaagatgcatgaattcgccgatcgaatcggttggaagattcagaaacgtgacgaagacgaagttcgtgatttttgccgtgagatcggagttgataaaggtgttctcaaagtttggatgcataataacaaaaactccttcaaattctccggcggaggagcaaccaccgtgcagagaaacgataacggtatcggcggcgagaacagtaacgatgatggagttcgcggtttagctaacgacggtgacggtggtggtgggagatttgagagtgatagtggaggagctgatggtggcggaaacgtaaacgcctcgtcgtcttcgtcgtgaagaagaaaacatcatgtcgttttgcagggaaagagttataataatggaagcttaagctttgtttttagctttagatcatagagagtaagcactggtattattatcgttaatacgttttattaatattaatt

SEQ ID NO: 32071 - protein, 312 aa, Arabidopsis thaliana
  misc_feature (1)..(312): Ceres Seq. ID no. 13592100
MLEVRSMDMTPKSPEPESETPTRIQPAKPISFSNGIIKRHHHHHHNNNKVTYKECLKNHAAAIGGHALDGCGEFMPSPSSTPSDPTSLKCAACGCHRNFHRRETDDSSAVPPPSLLPSSTTTAAIEYQPHHRHHPPPPLAPPLPRSPNSSSPPPISSSYMLLALSGNNKTAPFSDLNFAAAANHLSATPGSRKRFRTKFSSNQKEKMHEFADRIGWKIQKRDEDEVRDFCREIGVDKGVLKVWMHNNKNSFKFSGGGATTVQRNDNGIGGENSNDDGVRGLANDGDGGGGRFESDSGGADGGGNVNASSSSS

SEQ ID NO: 32072 - protein, 306 aa, Arabidopsis thaliana
  misc_feature (1)..(306): Ceres Seq. ID no. 13592101
MDMTPKSPEPESETPTRIQPAKPISFSNGIIKRHHHHHHNNNKVTYKECLKNHAAAIGGHALDGCGEFMPSPSSTPSDPTSLKCAACGCHRNFHRRETDDSSAVPPPSLLPSSTTTAAIEYQPHHRHHPPPPLAPPLPRSPNSSSPPPISSSYMLLALSGNNKTAPFSDLNFAAAANHLSATPGSRKRFRTKFSSNQKEKMHEFADRIGWKIQKRDEDEVRDFCREIGVDKGVLKVWMHNNKNSFKFSGGGATTVQRNDNGIGGENSNDDGVRGLANDGDGGGGRFESDSGGADGGGNVNASSSSS

SEQ ID NO: 32073 - protein, 304 aa, Arabidopsis thaliana
  misc_feature (1)..(304): Ceres Seq. ID no. 13592102
MTPKSPEPESETPTRIQPAKPISFSNGIIKRHHHHHHNNNKVTYKECLKNHAAAIGGHALDGCGEFMPSPSSTPSDPTSLKCAACGCHRNFHRRETDDSSAVPPPSLLPSSTTTAAIEYQPHHRHHPPPPLAPPLPRSPNSSSPPPISSSYMLLALSGNNKTAPFSDLNFAAAANHLSATPGSRKRFRTKFSSNQKEKMHEFADRIGWKIQKRDEDEVRDFCREIGVDKGVLKVWMHNNKNSFKFSGGGATTVQRNDNGIGGENSNDDGVRGLANDGDGGGGRFESDSGGADGGGNVNASSSSS

SEQ ID NO: 32074 - DNA, 2036 bp, Arabidopsis thaliana
  misc_feature (1)..(2036): Ceres Seq. ID no. 13592107
aagctagttcgaagactggtccgaaaaatctgacaaggatgaagcaatcaagtgtcgtcgatctgttacttcttctcctggcgatcgctcttcttgcgacgccggcgttctccgatctggttttatccaaagtcgaacgtcgtatcgatgtgacttcacagattgctcgtgttactaagacccttaaggttgtaaattctggctctgaatcagtttctgagtttgctttgacattcccaaagtttcttggtaacaacttggcttatctatcggttgctcctagtgagggaaaggggaaatctaaacgaactttagtgaatctctctgtgagagaagctgatcagaaaggtttacctgattcaattagtgtttactcagttgcattacccaaaccactgagtaaaggcgatactttgacgctggaggtagttgctgcattcaccaatgtacttcagccatttcctgaaaagataactcagggtgaaatccatcttgttatgctccaagaaagcgcacaatatctctctccttacgcggttgagtctcagtcattgtctatcaaactaccgaatgccagaatcgaatcttacaccaaattcgagaatacaaagctccagggatcagagctcaaatatggtccttacaagaatctccagtcgtattcatactctccaattgttgtccactttgaaagcaaggctgcatttgctgtggctgagaagcttgtgcgagagatagaagtgtctcattgggggaatgtgcaggtcacggagaattacaatgttgtccaccgtggggctcaactcaagggcgagttttcaaggttagattttcaagccagacctaatccccgtggagcatctgcctttaggcatttacttgctagattaccccccagagcccattccatatattacagggatgatattggaaatatctccacgtctgagatgaaaagtgattcgaaaaagacagagctactaattgagcctaggtttcctttgtttggtgggtggaaaacttttttcacgataggttatggtttgccacttaccgacttcttgtttgcttcggaaggaaagcgattccttaatatctcctttggctcccctatacttgaccttgtcactgaaaaacttattgtacaggtggttttacctgaggggtcaaaggatatatcagttaccactccattcgccgtcaagcagtctcaagagatcaaatattcacatttagatatagctggtagaccagttgttgtgctcgaaaagaacaacgttgtccctgatcacaatcagcatatccaggtctactataagttcagcaacatcaatctgctgagtgagccattgatgttaatctctggatttttcattttgttcatcacttgcatcatatacacacgggctgacatctcaatctccaagtcctctccgagttatttggcgaaacttcaatgggatgaggtcctagcaacactccaggaagtccaaagcatcgtccaaaaatgcttagccacacatgataagcttgaagcatcgctgcgtgatctctcaagaactggtgacattcaaacctgcaaagcagctcgcaaatccactgacagtttactgaaagatctttcgaaagaactgaaaccgttgctgggtttcttacagtctttcccatcagcctctcacatatctccaaaggtcgaggagctagttgtgaaagagaaagaacttcaagagaagttaatggccaaacataccactgttgttgaagggtacgaaaagaaatcctcagggcgtgatatcgaaaaccggatcgcttctcagcagcaaaagatcatagctttgaggcaagaaattgaagatcttctagaattcattgatgagatctagaaaagttaaatgtagcaaatcctcttacgcttaaataccagacttttgaactcactcccattagaaaaattttgttcctcaatgagcagtgtttatcaactttgaaagacagctctagtttctctgagtttaacaaatgaatcatattatctt

SEQ ID NO: 32075 - protein, 626 aa, Arabidopsis thaliana
  misc_feature (1)..(626): Ceres Seq. ID no. 13592108
ASSKTGPKNLTRMKQSSVVDLLLLLLAIALLATPAFSDLVLSKVERRIDVTSQIARVTKTLKVVNSGSESVSEFALTFPKFLGNNLAYLSVAPSEGKGKSKRTLVNLSVREADQKGLPDSISVYSVALPKPLSKGDTLTLEVVAAFTNVLQPFPEKITQGEIHLVMLQESAQYLSPYAVESQSLSIKLPNARIESYTKFENTKLQGSELKYGPYKNLQSYSYSPIVVHFESKAAFAVAEKLVREIEVSHWGNVQVTENYNVVHRGAQLKGEFSRLDFQARPNPRGASAFRHLLARLPPRAHSIYYRDDIGNISTSEMKSDSKKTELLIEPRFPLFGGWKTFFTIGYGLPLTDFLFASEGKRFLNISFGSPILDLVTEKLIVQVVLPEGSKDISVTTPFAVKQSQEIKYSHLDIAGRPVVVLEKNNVVPDHNQHIQVYYKFSNINLLSEPLMLISGFFILFITCIIYTRADISISKSSPSYLAKLQWDEVLATLQEVQSIVQKCLATHDKLEASLRDLSRTGDIQTCKAARKSTDSLLKDLSKELKPLLGFLQSFPSASHISPKVEELVVKEKELQEKLMAKHTTVVEGYEKKSSGRDIENRIASQQQKIIALRQEIEDLLEFIDEI

SEQ ID NO: 32076 - protein, 614 aa, Arabidopsis thaliana
  misc_feature (1)..(614): Ceres Seq. ID no. 13592109
MKQSSVVDLLLLLLAIALLATPAFSDLVLSKVERRIDVTSQIARVTKTLKVVNSGSESVSEFALTFPKFLGNNLAYLSVAPSEGKGKSKRTLVNLSVREADQKGLPDSISVYSVALPKPLSKGDTLTLEVVAAFTNVLQPFPEKITQGEIHLVMLQESAQYLSPYAVESQSLSIKLPNARIESYTKFENTKLQGSELKYGPYKNLQSYSYSPIVVHFESKAAFAVAEKLVREIEVSHWGNVQVTENYNVVHRGAQLKGEFSRLDFQARPNPRGASAFRHLLARLPPRAHSIYYRDDIGNISTSEMKSDSKKTELLIEPRFPLFGGWKTFFTIGYGLPLTDFLFASEGKRFLNISFGSPILDLVTEKLIVQVVLPEGSKDISVTTPFAVKQSQEIKYSHLDIAGRPVVVLEKNNVVPDHNQHIQVYYKFSNINLLSEPLMLISGFFILFITCIIYTRADISISKSSPSYLAKLQWDEVLATLQEVQSIVQKCLATHDKLEASLRDLSRTGDIQTCKAARKSTDSLLKDLSKELKPLLGFLQSFPSASHISPKVEELVVKEKELQEKLMAKHTTVVEGYEKKSSGRDIENRIASQQQKIIALRQEIEDLLEFIDEI

SEQ ID NO: 32077 - protein, 461 aa, Arabidopsis thaliana
  misc_feature (1)..(461): Ceres Seq. ID no. 13592110
MLQESAQYLSPYAVESQSLSIKLPNARIESYTKFENTKLQGSELKYGPYKNLQSYSYSPIVVHFESKAAFAVAEKLVREIEVSHWGNVQVTENYNVVHRGAQLKGEFSRLDFQARPNPRGASAFRHLLARLPPRAHSIYYRDDIGNISTSEMKSDSKKTELLIEPRFPLFGGWKTFFTIGYGLPLTDFLFASEGKRFLNISFGSPILDLVTEKLIVQVVLPEGSKDISVTTPFAVKQSQEIKYSHLDIAGRPVVVLEKNNVVPDHNQHIQVYYKFSNINLLSEPLMLISGFFILFITCIIYTRADISISKSSPSYLAKLQWDEVLATLQEVQSIVQKCLATHDKLEASLRDLSRTGDIQTCKAARKSTDSLLKDLSKELKPLLGFLQSFPSASHISPKVEELVVKEKELQEKLMAKHTTVVEGYEKKSSGRDIENRIASQQQKIIALRQEIEDLLEFIDEI

SEQ ID NO: 32078 - DNA, 1606 bp, Arabidopsis thaliana
  misc_feature (1)..(1606): Ceres Seq. ID no. 13592120
tgtttcttcaatatctctttctctccaacaaaatcaaaatcaagaaaacaaaaaagaaaaactctcaagaaacaatggatgcttcattgtctccattcgatcaccaaaaaactcaaaacacagagccaaagaaaagcttcattacctcactaatcactctccgttcaaacaacatcaaagaagacacatacttcgtctcagaactcaaacccacggagcaaaaatcacttcaagaactcaaagaaaagctctcagcttcatcctccaaagcttcttcaatgtggggagtctcactcctcggtggagacgacaaagctgacgtaatcctcctcaagttcctcagagcaagagatttcaaagtagcagactctttgagaatgcttgagaagtgtttggagtggagagaagagttcaaagcagagaaattgacagaagaagatctgggttttaaagatttggaaggtaaagttgcttacatgagaggctacgacaaagaaggacacccagtttgttacaatgcttatggtgtgtttaaagagaaagagatgtatgagagagtgtttggtgatgaagagaagcttaacaagtttctgagatggagagttcaggttttggagagaggtgttaaaatgcttcattttaaacctggtggtgttaattccattattcaagttacagatcttaaagatatgcctaagagagagcttagagttgcttctaatcagatcctctctctttttcaagataattaccctgaattggttgctactaagatattcataaacgtgccttggtacttcagtgtgatctactcaatgttcagcccattcctgactcagagaacaaagagcaagtttgtgatgtccaaagaaggcaatgcagcagaaacactctacaagttcattaggccagaagatattccggtgcaatacggtggtcttagccgtcctactgattcgcaaaacggaccgccaaaaccggcgtctgaattctccatcaagggtggtgagaaagttaacattcagattgaaggcattgagggtggagcaaccataacatgggatatagtagttggaggatgggatttagagtacagtgcagagtttgttccaaacgctgaagagagttacgcgatcgttgtcgagaaaccgaagaagatgaaagctacagatgaagctgtttgcaactctttcactacagtagaagctgggaagctcattctctctgttgacaatactctctctcgcaagaagaaagttgctgcttaccgttacactgtccggaaatctactacaaccgtctaatctataaccggtttttcagaagattggttgctttcttactactactttttgtgggtgtgttgaggggttttctttcttgggtttgagtactaggtttgttttgcttactcaacggttcatgttgaaccggaaatatcgataaatttgcgaggaaatcatatgtataaaaactatgatttgtatgacatttgatgtttggccttaatattttaactagagattgaagttttagtctgcaaagtgtaagcttatgtactctcttgtaccatgtttagctattgaagaccagtggtccattgctt

SEQ ID NO: 32079 - protein, 433 aa, Arabidopsis thaliana
  misc_feature (1)..(433): Ceres Seq. ID no. 13592121
FLQYLFLSNKIKIKKTKKKNSQETMDASLSPFDHQKTQNTEPKKSFITSLITLRSNNIKEDTYFVSELKPTEQKSLQELKEKLSASSSKASSMWGVSLLGGDDKADVILLKFLRARDFKVADSLRMLEKCLEWREEFKAEKLTEEDLGFKDLEGKVAYMRGYDKEGHPVCYNAYGVFKEKEMYERVFGDEEKLNKFLRWRVQVLERGVKMLHFKPGGVNSIIQVTDLKDMPKRELRVASNQILSLFQDNYPELVATKIFINVPWYFSVIYSMFSPFLTQRTKSKFVMSKEGNAAETLYKFIRPEDIPVQYGGLSRPTDSQNGPPKPASEFSIKGGEKVNIQIEGIEGGATITWDIVVGGWDLEYSAEFVPNAEESYAIVVEKPKKMKATDEAVCNSFTTVEAGKLILSVDNTLSRKKKVAAYRYTVRKSTTTV

SEQ ID NO: 32080 - protein, 409 aa, Arabidopsis thaliana
  misc_feature (1)..(409): Ceres Seq. ID no. 13592122
MDASLSPFDHQKTQNTEPKKSFITSLITLRSNNIKEDTYFVSELKPTEQKSLQELKEKLSASSSKASSMWGVSLLGGDDKADVILLKFLRARDFKVADSLRMLEKCLEWREEFKAEKLTEEDLGFKDLEGKVAYMRGYDKEGHPVCYNAYGVFKEKEMYERVFGDEEKLNKFLRWRVQVLERGVKMLHFKPGGVNSIIQVTDLKDMPKRELRVASNQILSLFQDNYPELVATKIFINVPWYFSVIYSMFSPFLTQRTKSKFVMSKEGNAAETLYKFIRPEDIPVQYGGLSRPTDSQNGPPKPASEFSIKGGEKVNIQIEGIEGGATITWDIVVGGWDLEYSAEFVPNAEESYAIVVEKPKKMKATDEAVCNSFTTVEAGKLILSVDNTLSRKKKVAAYRYTVRKSTTTV

SEQ ID NO: 32081 - protein, 341 aa, Arabidopsis thaliana
  misc_feature (1)..(341): Ceres Seq. ID no. 13592123
MWGVSLLGGDDKADVILLKFLRARDFKVADSLRMLEKCLEWREEFKAEKLTEEDLGFKDLEGKVAYMRGYDKEGHPVCYNAYGVFKEKEMYERVFGDEEKLNKFLRWRVQVLERGVKMLHFKPGGVNSIIQVTDLKDMPKRELRVASNQILSLFQDNYPELVATKIFINVPWYFSVIYSMFSPFLTQRTKSKFVMSKEGNAAETLYKFIRPEDIPVQYGGLSRPTDSQNGPPKPASEFSIKGGEKVNIQIEGIEGGATITWDIVVGGWDLEYSAEFVPNAEESYAIVVEKPKKMKATDEAVCNSFTTVEAGKLILSVDNTLSRKKKVAAYRYTVRKSTTTV

SEQ ID NO: 32082 - DNA, 1121 bp, Arabidopsis thaliana
  misc_feature (1)..(1121): Ceres Seq. ID no. 13592128
aaatgaaaagccagtgaattagggctttctctcacttgttgaagccgcttcttcttcttcctcactgtagctcgtcgtcgctacaccatctagaagacccttaaccatggctgtcgggaagaacaagaggatttcaaagggtaggaaaggaggaaagaagaaggctgttgatcccttctccaagaaggattggtatgacgtgaaggctcctggttctttcacgaacaggaatgttgggaagactcttgtttccaggactcagggtaccaagattgcctctgagggactgaaacacagggtgtttgaggtttctcttgctgatctacaaaatgatgaggataatgcctacaggaagatccgtcttagagctgaagatgttcagggaaggaatgtgttgacccagttctggggtatggatttcacaaccgacaagctaaggtcattggtgaagaagtggcagactttgattgaagcccatgtcgatgtgaaaaccacagacggctacaccttgaggatgttctgcatcgccttcacaaagagacgtgctaaccaagtgaagcgtacctgttacgctcaatccagccaaatccgtcagatccgcagaaagatgagtgagattatggtgaaggaggcttcatcttgtgacctcaaggagctagtggccaagttcatcccagaggccattggaagagagattgagaaggcaacacagggcatctacccgttgcagaatgtgttcatccgtaaagtgaagatcctaaaggctcccaagtttgaccttggaaagctcatggaggtgcatggagattacacagcagaggatgttggtgtgaaggtagacaggccagctgatgagacaatggttgaggagccaacagaaatcatcggagcttaggggattatagatttgtttgttttttcgctggcaaaaaaaaaaaagaacctaatgttatgtcgccattggtgtgactggttttggactcgtttttgatggatgatctttattgtttatcatgttttaccttttttattatatgtcttagttcttcacttcttcttttcatttttggaatctggatttgctctctcttcaaatatttaaatggacaagattaggattt

SEQ ID NO: 32083 - protein, 262 aa, Arabidopsis thaliana [sequence omitted]

SEQ ID NO: 32084 - protein, 160 aa, Arabidopsis thaliana
  misc_feature (1)..(160): Ceres Seq. ID no. 13592130
MDFTTDKLRSLVKKWQTLIEAHVDVKTTDGYTLRMFCIAFTKRRANQVKRTCYAQSSQIRQIRRKMSEIMVKEASSCDLKELVAKFIPEAIGREIEKATQGIYPLQNVFIRKVKILKAPKFDLGKLMEVHGDYTAEDVGVKVDRPADETMVEEPTEIIGA

SEQ ID NO: 32085 - DNA, 2396 bp, Arabidopsis thaliana
  misc_feature (1)..(2396): Ceres Seq. ID no. 13592135
tatctttgttacaaatcaatcttctactgttttctttttcctcttctttcattattttttgacagcaattcttagtttctcttctatcccctttctgggttttgtttgaaccctagctcgctttggatccagtggttttaagttaaaggtaaatttatcgaaagtaagtagattcctaatggcagcttccaatcattcatctggtaaacctggaggagttttaagtgatgctttatgtagggagctctggcatgcctgtgctggacctcttgtaaccctacctcgtgaaggggaacgagtttattatttccctgaaggccacatggagcagctcgaggcatcaatgcaccaaggtttggagcaacagatgccttccttcaacctcccatctaagatcctctgtaaagttatcaacatccagcgcagggcagagcccgagactgacgaagtatatgcgcaaataaccttattgccagaactggatcaaagcgaacccactagcccagatgcccctgttcaagaacctgaaaagtgcaccgtacattcattttgcaagacactaactgcttcagacacaagcacacatggtggcttctcggtgctacggagacatgcagatgattgtctcccacccttggatatgtcccaacaaccaccgtggcaagaattggttgcaactgatttgcacaatagtgaatggcattttaggcacattttccgaggccaaccaaggcgtcatttgctaacaactggatggagtgtttttgttagctcgaagaaactagtggctggtgatgctttcatattcttaaggggtgagaatgaagagctccgagtaggtgttaggcggcacatgagacaacagactaatatcccgtcatctgtcatttcaagtcatagcatgcatattggggtccttgcaacagcagctcatgccattacaacaggaacaatcttttctgtcttctacaagccaaggacaagtaggtcagagtttattgtgagcgtcaataggtatctcgaagctaagacccagaagctgtctgtaggcatgcgtttcaagatgagattcgagggggaagaagctcccgagaaaaggttcagtggcacaatagttggtgttcaggaaaataagtcttcggtctggcatgattctgaatggagatcgctaaaggttcaatgggacgaaccctcatctgtatttcgtcctgaaagagtttcaccttgggaacttgagcccctagttgcaaatagtactccgtcttcacaacctcagcctccgcaaaggaacaaacgaccaagacctcctggtttaccttcaccagccactggtccatctggtcctgttactccagatggtgtgtggaaatccccggcagacactccttcctcagtgccattattctctcctcctgccaaagctgctacgtttggtcatggtgggaacaaatcatttggagtatctattggatcagccttttggcccaccaatgcagatagtgcagctgaatcctttgcttcagcgtttaacaatgaatctactgaaaagaaacaaactaatggaaatgtctgtaggctttttgggtttgagctagttgaaaatgttaatgtggatgaatgtttctctgctgcctctgtgtctggtgctgtcgctgtagatcaacctgtcccatccaacgagtttgactctggccagcaatctgagccattaaacatcaaccaatctgatattccttcggggagtggtgaccctgagaaatcctctttgaggtctcctcaagaatcacaaagtagacagatacgtagctgcacaaaggtgcacatgcaaggcagtgcagtaggcagagctattgatttgacaaggtcagagtgttatgaagatctgttcaagaagctggaagagatgtttgatatcaagggtgaactcttagaatctaccaaaaaatggcaagtcgtttacaccgatgatgaagatgacatgatgatggttggtgatgatccatggaatgagttctgtggaatggtgaggaagatattcatctacacacctgaggaagtgaagaaactttcaccgaagaacaaactcgcagtcaatgcaaggatgcagctcaaagctgatgcagaggaaaatgggaatacagagggcagatcatcatctatggcgggatcaagatgagtatatcactgtgttatgttttaaatgtacttgccacgtaggaaatatgaaagcagaagcaagagatcgttagacaatatgaaagttgagatgtctgtgtatagcaatgaagttttatgtcttcaagtcttatgaattcacttagatgcaatgtgttttgaggagttgtgtagcttttgtacgggaaatatggaaattaagtttcacgtcttgttctacc

SEQ ID NO: 32086 - protein, 665 aa, Arabidopsis thaliana
  misc_feature (1)..(665): Ceres Seq. ID no. 13592136
MAASNHSSGKPGGVLSDALCRELWHACAGPLVTLPREGERVYYFPEGHMEQLEASMHQGLEQQMPSFNLPSKILCKVINIQRRAEPETDEVYAQITLLPELDQSEPTSPDAPVQEPEKCTVHSFCKTLTASDTSTHGGFSVLRRHADDCLPPLDMSQQPPWQELVATDLHNSEWHFRHIFRGQPRRHLLTTGWSVFVSSKKLVAGDAFIFLRGENEELRVGVRRHMRQQTNIPSSVISSHSMHIGVLATAAHAITTGTIFSVFYKPRTSRSEFIVSVNRYLEAKTQKLSVGMRFKMRFEGEEAPEKRFSGTIVGVQENKSSVWHDSEWRSLKVQWDEPSSVFRPERVSPWELEPLVANSTPSSQPQPPQRNKRPRPPGLPSPATGPSGPVTPDGVWKSPADTPSSVPLFSPPAKAATFGHGGNKSFGVSIGSAFWPTNADSAAESFASAFNNESTEKKQTNGNVCRLFGFELVENVNVDECFSAASVSGAVAVDQPVPSNEFDSGQQSEPLNINQSDIPSGSGDPEKSSLRSPQESQSRQIRSCTKVHMQGSAVGRAIDLTRSECYEDLFKKLEEMFDIKGELLESTKKWQVVYTDDEDDMMMVGDDPWNEFCGMVRKIFIYTPEEVKKLSPKNKLAVNARMQLKADAEENGNTEGRSSSMAGSR

SEQ ID NO: 32087 - protein, 617 aa, Arabidopsis thaliana
  misc_feature (1)..(617): Ceres Seq. ID no. 13592137
MEQLEASMHQGLEQQMPSFNLPSKILCKVINIQRRAEPETDEVYAQITLLPELDQSEPTSPDAPVQEPEKCTVHSFCKTLTASDTSTHGGFSVLRRHADDCLPPLDMSQQPPWQELVATDLHNSEWHFRHIFRGQPRRHLLTTGWSVFVSSKKLVAGDAFIFLRGENEELRVGVRRHMRQQTNIPSSVISSHSMHIGVLATAAHAITTGTIFSVFYKPRTSRSEFIVSVNRYLEAKTQKLSVGMRFKMRFEGEEAPEKRFSGTIVGVQENKSSVWHDSEWRSLKVQWDEPSSVFRPERVSPWELEPLVANSTPSSQPQPPQRNKRPRPPGLPSPATGPSGPVTPDGVWKSPADTPSSVPLFSPPAKAATFGHGGNKSFGVSIGSAFWPTNADSAAESFASAFNNESTEKKQTNGNVCRLFGFELVENVNVDECFSAASVSGAVAVDQPVPSNEFDSGQQSEPLNINQSDIPSGSGDPEKSSLRSPQESQSRQIRSCTKVHMQGSAVGRAIDLTRSECYEDLFKKLEEMFDIKGELLESTKKWQVVYTDDEDDMMMVGDDPWNEFCGMVRKIFIYTPEEVKKLSPKNKLAVNARMQLKADAEENGNTEGRSSSMAGSR

SEQ ID NO: 32088 - protein, 610 aa, Arabidopsis thaliana
  misc_feature (1)..(610): Ceres Seq. ID no. 13592138
MHQGLEQQMPSFNLPSKILCKVINIQRRAEPETDEVYAQITLLPELDQSEPTSPDAPVQEPEKCTVHSFCKTLTASDTSTHGGFSVLRRHADDCLPPLDMSQQPPWQELVATDLHNSEWHFRHIFRGQPRRHLLTTGWSVFVSSKKLVAGDAFIFLRGENEELRVGVRRHMRQQTNIPSSVISSHSMHIGVLATAAHAITTGTIFSVFYKPRTSRSEFIVSVNRYLEAKTQKLSVGMRFKMRFEGEEAPEKRFSGTIVGVQENKSSVWHDSEWRSLKVQWDEPSSVFRPERVSPWELEPLVANSTPSSQPQPPQRNKRPRPPGLPSPATGPSGPVTPDGVWKSPADTPSSVPLFSPPAKAATFGHGGNKSFGVSIGSAFWPTNADSAAESFASAFNNESTEKKQTNGNVCRLFGFELVENVNVDECFSAASVSGAVAVDQPVPSNEFDSGQQSEPLNINQSDIPSGSGDPEKSSLRSPQESQSRQIRSCTKVHMQGSAVGRAIDLTRSECYEDLFKKLEEMFDIKGELLESTKKWQVVYTDDEDDMMMVGDDPWNEFCGMVRKIFIYTPEEVKKLSPKNKLAVNARMQLKADAEENGNTEGRSSSMAGSR

SEQ ID NO: 32089 - DNA, 2092 bp, Arabidopsis thaliana
  misc_feature (1)..(2092): Ceres Seq. ID no. 13592139
gaacgaaactagaaaacgcctatctctgctcattggcttctccatctccgatcaaatccgcggtcgtagtcagagagagagacaaatggctatgcctagggcaacctctggtcccgcttacccggagaggttctacgctgctgcatcttatgtcggtctcgacggatctgattcgtcggcgaaaaacgtcatctcgaaattccccgatgatactgcactacttctctatgcgctataccagcaggctactgtaggaccatgcaacactccgaaacctagtgcctggagaccagtggagcaaagcaaatggaaaagttggcaggggctcggaaccatgccctccattgaggcaatgcgtctctttgtgaaaattctggaggaagatgatcctggttggtattcgagggcatctaatgatattccagatcctgttgtagatgtccaaattaatagagcaaaagatgagcctgttgttgagaatgggagcacatttagtgagacaaaaacaatttctacggagaatggacgtttggctgaaacccaagataaagatgtagtctcagaagactcaaatactgtttctgtatataaccagtggactgcaccccaaacatcaggtcagcgtccaaaagctcgttacgagcatggcgcagcagttattcaagataagatgtatatatatggtggaaatcacaatggccgttaccttggtgatcttcatgttctagatttaaaaagttggacttggtcaagagttgaaaccaaggttgcaacagaatctcaggaaacatcaactccgacattgttagctccttgtgctggtcattctttgatagcatgggacaacaagctgctgtctatcggtggtcacacaaaggatccctcagaatctatgcaagtgaaggtctttgatccccataccattacatggtcaatgttaaagacatatggaaaaccaccggtttcacgtggaggccagtcagttacaatggtgggtaaaaccttggtgatatttggcgggcaagatgcaaagagatcacttctgaacgatttgcatatacttgacctagacacgatgacctgggatgagatagatgccgtgggtgtatctccatctccgaggtctgatcatgctgctgcagtgcatgcagaacggttccttcttatctttggtggcggctcacatgcaacctgtttcgatgacctgcatgtccttgatttgcaaactatggagtggtcaagaccagcacagcaaggtgatgcaccaactccaagagctggacatgctggcgtgacaattggggagaactggtttattgttggtggcggtgataacaagagtggggcatcggagagtgttgtactaaacatgtcaactcttgcatggtcggtcgttgcttcagttcaaggacgtgtacctcttgctagcgagggattaagtttagtggtgagttcatacaatggtgaagatgtactagtcgcttttggtggatacaatggacgttacaataacgaaattaatcttcttaaaccaagccacaaatcaacattgcaaacaaagactctggaagcgcctttgccaggtagtctttctgctgttaataatgccacaaccagagacattgagtctgaggttgaggtgagccaagaaggcagggtacgggaaattgtcatggacaatgttaaccctggatcaaaggttgaaggaaacagcgaacgcattattgcgactattaaatctgagaaggaagagctggaggcatcactgaacaaagagaggatgcagactctccaactaaggcaagagttaggagaagcagaattacgaaacacagatttgtacaaggaacttcaatctgttcgtggccaacttgcagccgaacaatcaaggtgtttcaaactggaggttgatgttgcagagctaagacaaaagcttcaaacattggaaacactacagaaggaactcgaactcctgcaacgtcaaaaggctgcctcagaacaagctgcaatgaacgctaaacgacagggctcgggtggcgtatggggctggctcgctggaagccctcaggaaaaagatgatgattcgccttga

SEQ ID NO: 32090 - protein, 696 aa, Arabidopsis thaliana
  misc_feature (1)..(696): Ceres Seq. ID no. 13592140
NETRKRLSLLIGFSISDQIRGRSQRERQMAMPRATSGPAYPERFYAAASYVGLDGSDSSAKNVISKFPDDTALLLYALYQQATVGPCNTPKPSAWRPVEQSKWKSWQGLGTMPSIEAMRLFVKILEEDDPGWYSRASNDIPDPVVDVQINRAKDEPVVENGSTFSETKTISTENGRLAETQDKDVVSEDSNTVSVYNQWTAPQTSGQRPKARYEHGAAVIQDKMYIYGGNHNGRYLGDLHVLDLKSWTWSRVETKVATESQETSTPTLLAPCAGHSLIAWDNKLLSIGGHTKDPSESMQVKVFDPHTITWSMLKTYGKPPVSRGGQSVTMVGKTLVIFGGQDAKRSLLNDLHILDLDTMTWDEIDAVGVSPSPRSDHAAAVHAERFLLIFGGGSHATCFDDLHVLDLQTMEWSRPAQQGDAPTPRAGHAGVTIGENWFIVGGGDNKSGASESVVLNMSTLAWSVVASVQGRVPLASEGLSLVVSSYNGEDVLVAFGGYNGRYNNEINLLKPSHKSTLQTKTLEAPLPGSLSAVNNATTRDIESEVEVSQEGRVREIVMDNVNPGSKVEGNSERIIATIKSEKEELEASLNKERMQTLQLRQELGEAELRNTDLYKELQSVRGQLAAEQSRCFKLEVDVAELRQKLQTLETLQKELELLQRQKAASEQAAMNAKRQGSGGVWGWLAGSPQEKDDDSP

SEQ ID NO: 32091 - protein, 668 aa, Arabidopsis thaliana
  misc_feature (1)..(668): Ceres Seq. ID no. 13592141
MAMPRATSGPAYPERFYAAASYVGLDGSDSSAKNVISKFPDDTALLLYALYQQATVGPCNTPKPSAWRPVEQSKWKSWQGLGTMPSIEAMRLFVKILEEDDPGWYSRASNDIPDPVVDVQINRAKDEPVVENGSTFSETKTISTENGRLAETQDKDVVSEDSNTVSVYNQWTAPQTSGQRPKARYEHGAAVIQDKMYIYGGNHNGRYLGDLHVLDLKSWTWSRVETKVATESQETSTPTLLAPCAGHSLIAWDNKLLSIGGHTKDPSESMQVKVFDPHTITWSMLKTYGKPPVSRGGQSVTMVGKTLVIFGGQDAKRSLLNDLHILDLDTMTWDEIDAVGVSPSPRSDHAAAVHAERFLLIFGGGSHATCFDDLHVLDLQTMEWSRPAQQGDAPTPRAGHAGVTIGENWFIVGGGDNKSGASESVVLNMSTLAWSVVASVQGRVPLASEGLSLVVSSYNGEDVLVAFGGYNGRYNNEINLLKPSHKSTLQTKTLEAPLPGSLSAVNNATTRDIESEVEVSQEGRVREIVMDNVNPGSKVEGNSERIIATIKSEKEELEASLNKERMQTLQLRQELGEAELRNTDLYKELQSVRGQLAAEQSRCFKLEVDVAELRQKLQTLETLQKELELLQRQKAASEQAAMNAKRQGSGGVWGWLAGSPQEKDDDSP

SEQ ID NO: 32092 - protein, 666 aa, Arabidopsis thaliana
  misc_feature (1)..(666): Ceres Seq. ID no. 13592142
MPRATSGPAYPERFYAAASYVGLDGSDSSAKNVISKFPDDTALLLYALYQQATVGPCNTPKPSAWRPVEQSKWKSWQGLGTMPSIEAMRLFVKILEEDDPGWYSRASNDIPDPVVDVQINRAKDEPVVENGSTFSETKTISTENGRLAETQDKDVVSEDSNTVSVYNQWTAPQTSGQRPKARYEHGAAVIQDKMYIYGGNHNGRYLGDLHVLDLKSWTWSRVETKVATESQETSTPTLLAPCAGHSLIAWDNKLLSIGGHTKDPSESMQVKVFDPHTITWSMLKTYGKPPVSRGGQSVTMVGKTLVIFGGQDAKRSLLNDLHILDLDTMTWDEIDAVGVSPSPRSDHAAAVHAERFLLIFGGGSHATCFDDLHVLDLQTMEWSRPAQQGDAPTPRAGHAGVTIGENWFIVGGGDNKSGASESVVLNMSTLAWSVVASVQGRVPLASEGLSLVVSSYNGEDVLVAFGGYNGRYNNEINLLKPSHKSTLQTKTLEAPLPGSLSAVNNATTRDIESEVEVSQEGRVREIVMDNVNPGSKVEGNSERIIATIKSEKEELEASLNKERMQTLQLRQELGEAELRNTDLYKELQSVRGQLAAEQSRCFKLEVDVAELRQKLQTLETLQKELELLQRQKAASEQAAMNAKRQGSGGVWGWLAGSPQEKDDDSP

SEQ ID NO: 32093 - DNA, 3085 bp, Arabidopsis thaliana
  misc_feature (1)..(3085): Ceres Seq. ID no. 13592143
cctygtcgtcctcagatctcatctcactcacaagagagagatagagagagaaaaaggctctgctttctacattatttacgattatacactttccaacatggcggcctctgtagataatcgccaatacgctcgtctcgagccaggtttgaacggcgtggttcgttcttacaaacctcccgttccaggccggtccgattcccctaaggcgcaccagaaccaaaccaccaaccaaaccgtgttcttgaaaccagccaaggttcatgacgatgacgaagacgtgtcgagcgaagacgagaacgagacacacaacagcaacgccgtgtactacaaggagatgataagaaaatccaacgccgagcttgaaccgtccgttttggacccgagggacgaatacacggctgatagctggatcgagcgtaacccttccatggtacgtctcacagggaaacatcccttcaactccgaggcgcctcttaaccgtttaatgcaccacgggtttatcacccctgtcccgttgcactacgttcgtaaccacggccacgtccctaaagcccaatgggccgaatggacggtcgaggtgaccggattcgtcaaacggcccatgaaattcaccatggaccagctcgtctccgagtttgcttaccgcgagttcgccgcgacgctagtctgcgcggggaaccgccgtaaggaacagaacatggtgaagaagtcaaagggattcaactggggatccgccggagtttccacctccgtgtggcgtggtgtccctctctgcgacgtactgcgtcgctgcgggatctttagccgaaaaggcggcgctctcaacgtctgcttcgaagggtcggaggatcttccgggcggtgccggaactgctggttccaaatacggaacgagcatcaagaaggaatatgccatggatccatcaagagacatcattttggcttatatgcaaaacggagagtatctaacaccagaccacggttttccggttcggatcatcatccccggtttcattggtggccggatggttaaatggttgaaacgaatcattgtcacaactaaagaatccgacaatttctaccatttcaaggacaacagagttttaccttctttggtagacgccgaactcgccgacgaagaaggttggtggtataagccagagtacataatcaacgagctaaacataaactccgtgattacgacgccatgtcacgaggagattcttcccatcaacgctttcacaacccaaagaccttatactttaaagggttacgcatattccggaggtggaaaaaaagtgacccgtgtggaggtcacggtagatggtggagagacatggaacgtatgtgcacttgaccatcaagagaagccaaacaagtatgggaagttctggtgttggtgtttttggtcacttgaggttgaggttttggacttgcttagtgccaaagagattgctgttcgtgcatgggacgagactctcaacacgcagcccgagaaaatgatatggaatctcatggggatgatgaataactgctggtttagagtgaagactaacgtgtgcaagccacacaagggagagattgggattgtgttcgagcatccaacgcttcctggtaatgaatctggtggatggatggcgaaggaacgtcacctcgaaaaatcggctgacgcgcctcctagtctaaagaagtctgtctcgacgccgtttatgaacacaactgcgaagatgtactcgatgtccgaggtcaagaagcataattcggctgactcttgctggatcattgtccatggacatatctatgattgtacacgattccttatggatcacccgggtggttcggattcaatcttgatcaatgctggtacggattgtacggaggagtttgaagccattcactcggataaagccaagaagatgcttgaggattaccgtatcggtgagctcatcaccactggttattcctctgactcttcctcgcctaacaactcggttcacggttcatccgccgtgttctcgctgttggctcccattggagaggcgactccggttaggaacctcgctttggttaatccccgggctaaagtcccggttcaactcgtcgaaaagacttccatttctcatgatgttcgtaaattccggtttgctttaccggttgaggatatggttctaggcttaccggttggtaagcacattttcctttgcgccaccatcaatgacaagctctgcctcagagcttacacaccaagcagcaccgttgatgtggttggctacttcgagctcgtggtcaagatttactttggcggtgtccacccaagattccctaacggcgggctcatgtctcagtacctagactctttgcctatagggtcaactttggagattaaaggaccattgggtcacgttgagtatctcggcaagggtagtttcacggttcacggtaaaccaaagtttgctgataaattggcaatgttggcaggtggaaccggaataactccggtttaccaaattatccaagccattctcaaggatccagaggatgagactgaaatgtacgtcatttatgctaaccggaccgaggaagatattctcctaagggaggaactggatggttgggcagagcaatacccggaccggttaaaggtttggtacgtagtggaatcagctaaggaaggttgggcatacagtaccgggtttatttccgaggcgattatgcgagaacatatccctgatggattagatggctcagcccttgccatggcttgcggaccaccaccgatgattcagtttgcggttcagccgaatttggagaagatgcaatataacatcaaggaggatttcttgatattctagtctaaagccaagatatttcaaagtcaaaacgttaagtcgtcaaaaagcctagtgttatgatagattctaaataagtattgagggatttgtttgtatataatgttggttctttaaagtcttggatttggaaatataatgtgttcgttgtattcacgatcgatattttttttcacaataatatacaaaaagtaatttcagaaaaaaaaaaaaaaaaaactcgagggggggcccggt

SEQ ID NO: 32094 - protein, 949 aa, Arabidopsis thaliana
  misc_feature (1)..(949): Ceres Seq. ID no. 15221079
  misc_feature (1)..(1): Xaa is any aa, unknown or other
XVVLRSHLTHKREIEREKGSAFYIIYDYTLSNMAASVDNRQYARLEPGLNGVVRSYKPPVPGRSDSPKAHQNQTTNQTVFLKPAKVHDDDEDVSSEDENETHNSNAVYYKEMIRKSNAELEPSVLDPRDEYTADSWIERNPSMVRLTGKHPFNSEAPLNRLMHHGFITPVPLHYVRNHGHVPKAQWAEWTVEVTGFVKRPMKFTMDQLVSEFAYREFAATLVCAGNRRKEQNMVKKSKGFNWGSAGVSTSVWRGVPLCDVLRRCGIFSRKGGALNVCFEGSEDLPGGAGTAGSKYGTSIKKEYAMDPSRDIILAYMQNGEYLTPDHGFPVRIIIPGFIGGRMVKWLKRIIVTTKESDNFYHFKDNRVLPSLVDAELADEEGWWYKPEYIINELNINSVITTPCHEEILPINAFTTQRPYTLKGYAYSGGGKKVTRVEVTVDGGETWNVCALDHQEKPNKYGKFWCWCFWSLEVEVLDLLSAKEIAVRAWDETLNTQPEKMIWNLMGMMNNCWFRVKTNVCKPHKGEIGIVFEHPTLPGNESGGWMAKERHLEKSADAPPSLKKSVSTPFMNTTAKMYSMSEVKKHNSADSCWIIVHGHIYDCTRFLMDHPGGSDSILINAGTDCTEEFEAIHSDKAKKMLEDYRIGELITTGYSSDSSSPNNSVHGSSAVFSLLAPIGEATPVRNLALVNPRAKVPVQLVEKTSISHDVRKFRFALPVEDMVLGLPVGKHIFLCATINDKLCLRAYTPSSTVDVVGYFELVVKIYFGGVHPRFPNGGLMSQYLDSLPIGSTLEIKGPLGHVEYLGKGSFTVHGKPKFADKLAMLAGGTGITPVYQIIQAILKDPEDETEMYVIYANRTEEDILLREELDGWAEQYPDRLKVWYVVESAKEGWAYSTGFISEAIMREHIPDGLDGSALAMACGPPPMIQFAVQPNLEKMQYNIKEDFLIF

SEQ ID NO: 32095 - protein, 917 aa, Arabidopsis thaliana
  misc_feature (1)..(917): Ceres Seq. ID no. 15221080
MAASVDNRQYARLEPGLNGVVRSYKPPVPGRSDSPKAHQNQTTNQTVFLKPAKVHDDDEDVSSEDENETHNSNAVYYKEMIRKSNAELEPSVLDPRDEYTADSWIERNPSMVRLTGKHPFNSEAPLNRLMHHGFITPVPLHYVRNHGHVPKAQWAEWTVEVTGFVKRPMKFTMDQLVSEFAYREFAATLVCAGNRRKEQNMVKKSKGFNWGSAGVSTSVWRGVPLCDVLRRCGIFSRKGGALNVCFEGSEDLPGGAGTAGSKYGTSIKKEYAMDPSRDIILAYMQNGEYLTPDHGFPVRIIIPGFIGGRMVKWLKRIIVTTKESDNFYHFKDNRVLPSLVDAELADEEGWWYKPEYIINELNINSVITTPCHEEILPINAFTTQRPYTLKGYAYSGGGKKVTRVEVTVDGGETWNVCALDHQEKPNKYGKFWCWCFWSLEVEVLDLLSAKEIAVRAWDETLNTQPEKMIWNLMGMMNNCWFRVKTNVCKPHKGEIGIVFEHPTLPGNESGGWMAKERHLEKSADAPPSLKKSVSTPFMNTTAKMYSMSEVKKHNSADSCWIIVHGHIYDCTRFLMDHPGGSDSILINAGTDCTEEFEAIHSDKAKKMLEDYRIGELITTGYSSDSSSPNNSVHGSSAVFSLLAPIGEATPVRNLALVNPRAKVPVQLVEKTSISHDVRKFRFALPVEDMVLGLPVGKHIFLCATINDKLCLRAYTPSSTVDVVGYFELVVKIYFGGVHPRFPNGGLMSQYLDSLPIGSTLEIKGPLGHVEYLGKGSFTVHGKPKFADKLAMLAGGTGITPVYQIIQAILKDPEDETEMYVIYANRTEEDILLREELDGWAEQYPDRLKVWYVVESAKEGWAYSTGFISEAIMREHIPDGLDGSALAMACGPPPMIQFAVQPNLEKMQYNIKEDFLIF

SEQ ID NO: 32096 - protein, 838 aa, Arabidopsis thaliana
  misc_feature (1)..(838): Ceres Seq. ID no. 15221081
MIRKSNAELEPSVLDPRDEYTADSWIERNPSMVRLTGKHPFNSEAPLNRLMHHGFITPVPLHYVRNHGHVPKAQWAEWTVEVTGFVKRPMKFTMDQLVSEFAYREFAATLVCAGNRRKEQNMVKKSKGFNWGSAGVSTSVWRGVPLCDVLRRCGIFSRKGGALNVCFEGSEDLPGGAGTAGSKYGTSIKKEYAMDPSRDIILAYMQNGEYLTPDHGFPVRIIIPGFIGGRMVKWLKRIIVTTKESDNFYHFKDNRVLPSLVDAELADEEGWWYKPEYIINELNINSVITTPCHEEILPINAFTTQRPYTLKGYAYSGGGKKVTRVEVTVDGGETWNVCALDHQEKPNKYGKFWCWCFWSLEVEVLDLLSAKEIAVRAWDETLNTQPEKMIWNLMGMMNNCWFRVKTNVCKPHKGEIGIVFEHPTLPGNESGGWMAKERHLEKSADAPPSLKKSVSTPFMNTTAKMYSMSEVKKHNSADSCWIIVHGHIYDCTRFLMDHPGGSDSILINAGTDCTEEFEAIHSDKAKKMLEDYRIGELITTGYSSDSSSPNNSVHGSSAVFSLLAPIGEATPVRNLALVNPRAKVPVQLVEKTSISHDVRKFRFALPVEDMVLGLPVGKHIFLCATINDKLCLRAYTPSSTVDVVGYFELVVKIYFGGVHPRFPNGGLMSQYLDSLPIGSTLEIKGPLGHVEYLGKGSFTVHGKPKFADKLAMLAGGTGITPVYQIIQAILKDPEDETEMYVIYANRTEEDILLREELDGWAEQYPDRLKVWYVVESAKEGWAYSTGFISEAIMREHIPDGLDGSALAMACGPPPMIQFAVQPNLEKMQYNIKEDFLIF

SEQ ID NO: 32097 - DNA, 2124 bp, Arabidopsis thaliana
  misc_feature (1)..(2124): Ceres Seq. ID no. 13592165
gacgacaagagacgacctttgagactcgagaagctctctccaaaaacaaacgaaaagaagcgacttttgcctcttttggtctctccccttctccggagagatctgctctctctatctatctctcaatctgtaagaagaagattcccacttcagtaaaagccctaactttacttgggaaagttcttcatctatcatccttcaatcgtcatcatccatggctgatcaacaaaccctagattcctctactcctcctcctactcaatccgatgatctatctcactcccactctacttcctctactacttcagcttcttcttcctcagatccatcactcttgaggtctctctccttaagtcgactcaacgccggagctcctgagttcgttcctggtcgaactactcctccgctgcctcaacctccgaggatgattatcccgcctcctccgccgcacggtatgcttcatatgtatcaccaccagcctcctttcaatactccagttcttggtcctgttccaatccagccacacttggttcctgttcaaaatcaccaccctcatcatcgctttcatcagcatcatcatcacaatcgtcatcagaatcagcaatatgtcccggtgaggaatcacggagagtatcagcagcgtggtggtgtcggtggtgagcaggaaccggatttggtttcaaagaagaatgatcggagagatcatagtaagagagaatctaagaacgatcaagtgactgaaactggagcttctgtttctattgattcaaaaactggtttgcctgaagattctatccagaagattgtgaatcaggttgaatactatttcagtgacttgaacttggctactacagatcatctcatgagattcatttgcaaggatcctgaaggatatgtgcctattcatgttgttgcgtcgttcaagaaaattaaagctgtcattaacaataattctcagcttgccgcagtgctacagaactcagctaagctttttgttagtgaagatggaaagaaagtgagacgcataagtccgattactgagtcggctatagaagagcttcagtctcgcattattgttgctgagaatctccctgaggatcattgctaccaaaacctgatgaagattttttcaactgttggaagtgtgaagaacatccgtacctgccagcctcaaaataatggaagcggtgctccacccgcagcgagatcagcagctaaaagcgatggtacgcttttcagtaacaaggtccatgcttttgttgagtatgagattgttgagctagccgagagagcagttaccgagttaagtgaagcgggaaattggaggagcggtcttaaagtccggttgatgctaaagcatcagacgaaggaaccaaaacaaggtcaagggcgaggaagaaaaggacatgatgcagatgtagaacatgaggaagatgatgctacaacatccgagcagcagccgattgagaaacaatctgatgactgttctggggaatgggatacacatatgcaagagcagccaataggagaggatcaagggaatgagaaagcggctgggcagagaaaagggcgtaacagaggtagaggaaagggacgaggacgagggcaaccacaccagaaccaaaaccagaacaacaaccacagccataaccaaaaccacaaccacaatgggcgaggaaatcatcatcatcatcatcatcatcaagtgggaacacaaccttcgaacaatccaatgaacaacatggagcaaccaggcatggggaaacagcaaccacctggaccacgaatgcctgatgggaccagaggattctcaatgggacggggaaagccggttatggttcaggcagagtgatccagagctgttttgaaaaggaggtgatgtggaattgtgaatggtcaaaaagggagataaatagagagagagcaagagagaaagagagagatttatccttcccatggggattggctagttttgcagactttatatttgtcttacttacttcgaaatacttttcaattacgcttctcttacaaggaaacaacaaaaaaactacattttcctcatatagtgtacgtgtaatgaaacagcaatttcagttaatattttgtcctaaaagcttttct

SEQ ID NO: 32098 - protein, 545 aa, Arabidopsis thaliana
  misc_feature (1)..(545): Ceres Seq. ID no. 13592166
MADQQTLDSSTPPPTQSDDLSHSHSTSSTTSASSSSDPSLLRSLSLSRLNAGAPEFVPGRTTPPLPQPPRMIIPPPPPHGMLHMYHHQPPFNTPVLGPVPIQPHLVPVQNHHPHHRFHQHHHHNRHQNQQYVPVRNHGEYQQRGGVGGEQEPDLVSKKNDRRDHSKRESKNDQVTETGASVSIDSKTGLPEDSIQKIVNQVEYYFSDLNLATTDHLMRFICKDPEGYVPIHVVASFKKIKAVINNNSQLAAVLQNSAKLFVSEDGKKVRRISPITESAIEELQSRIIVAENLPEDHCYQNLMKIFSTVGSVKNIRTCQPQNNGSGAPPAARSAAKSDGTLFSNKVHAFVEYEIVELAERAVTELSEAGNWRSGLKVRLMLKHQTKEPKQGQGRGRKGHDADVEHEEDDATTSEQQPIEKQSDDCSGEWDTHMQEQPIGEDQGNEKAAGQRKGRNRGRGKGRGRGQPHQNQNQNNNHSHNQNHNHNGRGNHHHHHHHQVGTQPSNNPMNNMEQPGMGKQQPPGPRMPDGTRGFSMGRGKPVMVQAE

SEQ ID NO: 32099 - protein, 475 aa, Arabidopsis thaliana
  misc_feature (1)..(475): Ceres Seq. ID no. 13592167
MIIPPPPPHGMLHMYHHQPPFNTPVLGPVPIQPHLVPVQNHHPHHRFHQHHHHNRHQNQQYVPVRNHGEYQQRGGVGGEQEPDLVSKKNDRRDHSKRESKNDQVTETGASVSIDSKTGLPEDSIQKIVNQVEYYFSDLNLATTDHLMRFICKDPEGYVPIHVVASFKKIKAVINNNSQLAAVLQNSAKLFVSEDGKKVRRISPITESAIEELQSRIIVAENLPEDHCYQNLMKIFSTVGSVKNIRTCQPQNNGSGAPPAARSAAKSDGTLFSNKVHAFVEYEIVELAERAVTELSEAGNWRSGLKVRLMLKHQTKEPKQGQGRGRKGHDADVEHEEDDATTSEQQPIEKQSDDCSGEWDTHMQEQPIGEDQGNEKAAGQRKGRNRGRGKGRGRGQPHQNQNQNNNHSHNQNHNHNGRGNHHHHHHHQVGTQPSNNPMNNMEQPGMGKQQPPGPRMPDGTRGFSMGRGKPVMVQAE

SEQ ID NO: 32100 - protein, 465 aa, Arabidopsis thaliana
  misc_feature (1)..(465): Ceres Seq. ID no. 13592168
MLHMYHHQPPFNTPVLGPVPIQPHLVPVQNHHPHHRFHQHHHHNRHQNQQYVPVRNHGEYQQRGGVGGEQEPDLVSKKNDRRDHSKRESKNDQVTETGASVSIDSKTGLPEDSIQKIVNQVEYYFSDLNLATTDHLMRFICKDPEGYVPIHVVASFKKIKAVINNNSQLAAVLQNSAKLFVSEDGKKVRRISPITESAIEELQSRIIVAENLPEDHCYQNLMKIFSTVGSVKNIRTCQPQNNGSGAPPAARSAAKSDGTLFSNKVHAFVEYEIVELAERAVTELSEAGNWRSGLKVRLMLKHQTKEPKQGQGRGRKGHDADVEHEEDDATTSEQQPIEKQSDDCSGEWDTHMQEQPIGEDQGNEKAAGQRKGRNRGRGKGRGRGQPHQNQNQNNNHSHNQNHNHNGRGNHHHHHHHQVGTQPSNNPMNNMEQPGMGKQQPPGPRMPDGTRGFSMGRGKPVMVQAE

SEQ ID NO: 32101 - DNA, 2719 bp, Arabidopsis thaliana
  misc_feature (1)..(2719): Ceres Seq. ID no. 13592177
gacacttcgtcgtctctctttcactacttttgagaagctctcttcttcgagcttccatggatgcaatcaaatgcagttccagtttcctccatcacaccaagctcaacactctcttctctaatcacacctttcctaaaatctccgctcccaatttcaagcccctcttccgtccgatttcgatttccgcaaaggacagaagaagcaacgaagctgaaaatatcgccgtagtagagaaacctcttaaatcagatagattttttatctccgatggacttccttctccattcggacccaccgtcagagacgacggcgtcaatttctctgtttactctacaaactccgtttccgctaccatctgcttgatttctctctccgatctccgtcagaacaaagtgacggaggagattcagcttgatccatcaaggaatagaactggccatgtttggcatgtgttcttgagaggagatttcaaagatatgttgtatggttatagatttgatggcaagttttctcctgaagaaggtcattattatgattcctccaacattttattggatccttacgcaaaggcaattataagcagagatgagtttggagttttgggacctgatgataattgttggcctcaaatggcgtgtatggtacccactcgtgaggaagagtttgattgggaaggggatatgcatctgaagcttccacagaaagatcttgttatatatgaaatgcatgtgcgaggttttacaaggcatgagtctagtaaaattgaattccctggcacataccagggtgttgcagagaagcttgaccatttgaaggagcttgggataaattgtatagaattaatgccatgtcacgagtttaatgagctggagtattacagctacaatacgattttgggagaccacagggtaaatttttggggttactctaccattgggttcttctcgcccatgatcagatacgcatcagcaagctctaacaattttgctggacgagccataaatgaattcaaaattcttgttaaggaggcacataaacgaggaattgaggtaatcatggatgtcgtcttgaaccacacagccgaagggaatgaaaaagggcccattttctcatttagaggagttgataacagtgtctattacatgcttgctccaaagggcgagttctataattattcaggctgtggtaatacattcaactgcaatcatcctgtggtgcgtcaattcatattggattgcctgagatattgggttacagaaatgcatgttgacggcttccgctttgatcttggttcaatcatgtcaaggagcagcagcctttgggatgcagccaatgtttacggggctgatgtagaaggtgacttgctcacaactggtactcctattagctgccctccagtaattgacatgataagtaatgatccaatactccgcggtgttaagctaatagctgaagcatgggatgcgggtgggctgtaccaagttggcatgtttccacactggggtatttggtctgagtggaatggaaagtttcgggatgttgtgagacagttcataaaaggcaccgatggcttttctggtgcttttgctgaatgtctctgtggaagcccaaatctgtaccagggaggtaggaaaccttggcacagcatcaattttatatgtgcgcatgatggttttacgttggcagatttagtaacttacaacaataagaataacttggcaaatggagaagagaataatgatggagagaatcacaattacagctggaactgtggagaggagggagactttgcgagtatctcggtgaagagactaaggaaacgacagatgcggaatttctttgtttccctcatggtttcccaaggtgtcccaatgatttacatgggagatgaatatggccatactaaagggggaaacaacaacacgtattgccatgacaactatatgaactattttcggtgggataaaaaggaagaagcacattctgacttcttcagattctgccgtattcttatcaagtttcgtgatgaatgtgaatcacttggcttgaatgatttcccaacagcaaagcgtctgcagtggcatggtcttgctcctgagatcccaaattggtctgaaacaagtcgatttgttgcattttcactggtcgattctgtgaagaaagaaatctatgtggccttcaacaccagtcatttagccacacttgtttcgctaccgaataggccaggataccgatgggagccatttgtagacacgagcaaaccgagcccttacgactgcataacaccggatctcccagagagagaaacggcgatgaagcagtataggcacttcttagatgcaaatgtgtacccaatgctcagttactcatccatcattctccttctttcaccaattaaagacccctgagtttgcgtgattcctccaaaagcgtattagacaaaatcacaacatatgaaggaatcttctcaaatgtgaatgagatgcatatacagacaactatttcgttacctatataatgtattatagtaaaggttccttttatggttagaagaatctgaatggggtacctttggtcggcttcagatatgcccactcattgttaatagattcctttatcgtctgttaatccaatcaaaagcttgttacatcgttttcagaattcgtgtaagaacaagaaatcaaagttttcatctataaagttataaatgattattagt

SEQ ID NO: 32102 - protein, 801 aa, Arabidopsis thaliana
  misc_feature (1)..(801): Ceres Seq. ID no. 13592178
HFVVSLSLLLRSSLLRASMDAIKCSSSFLHHTKLNTLFSNHTFPKISAPNFKPLFRPISISAKDRRSNEAENIAVVEKPLKSDRFFISDGLPSPFGPTVRDDGVNFSVYSTNSVSATICLISLSDLRQNKVTEEIQLDPSRNRTGHVWHVFLRGDFKDMLYGYRFDGKFSPEEGHYYDSSNILLDPYAKAIISRDEFGVLGPDDNCWPQMACMVPTREEEFDWEGDMHLKLPQKDLVIYEMHVRGFTRHESSKIEFPGTYQGVAEKLDHLKELGINCIELMPCHEFNELEYYSYNTILGDHRVNFWGYSTIGFFSPMIRYASASSNNFAGRAINEFKILVKEAHKRGIEVIMDVVLNHTAEGNEKGPIFSFRGVDNSVYYMLAPKGEFYNYSGCGNTFNCNHPVVRQFILDCLRYWVTEMHVDGFRFDLGSIMSRSSSLWDAANVYGADVEGDLLTTGTPISCPPVIDMISNDPILRGVKLIAEAWDAGGLYQVGMFPHWGIWSEWNGKFRDVVRQFIKGTDGFSGAFAECLCGSPNLYQGGRKPWHSINFICAHDGFTLADLVTYNNKNNLANGEENNDGENHNYSWNCGEEGDFASISVKRLRKRQMRNFFVSLMVSQGVPMIYMGDEYGHTKGGNNNTYCHDNYMNYFRWDKKEEAHSDFFRFCRILIKFRDECESLGLNDFPTAKRLQWHGLAPEIPNWSETSRFVAFSLVDSVKKEIYVAFNTSHLATLVSLPNRPGYRWEPFVDTSKPSPYDCITPDLPERETAMKQYRHFLDANVYPMLSYSSIILLLSPIKDP

SEQ ID NO: 32103 - protein, 783 aa, Arabidopsis thaliana
  misc_feature (1)..(783): Ceres Seq. ID no. 13592179
MDAIKCSSSFLHHTKLNTLFSNHTFPKISAPNFKPLFRPISISAKDRRSNEAENIAVVEKPLKSDRFFISDGLPSPFGPTVRDDGVNFSVYSTNSVSATICLISLSDLRQNKVTEEIQLDPSRNRTGHVWHVFLRGDFKDMLYGYRFDGKFSPEEGHYYDSSNILLDPYAKAIISRDEFGVLGPDDNCWPQMACMVPTREEEFDWEGDMHLKLPQKDLVIYEMHVRGFTRHESSKIEFPGTYQGVAEKLDHLKELGINCIELMPCHEFNELEYYSYNTILGDHRVNFWGYSTIGFFSPMIRYASASSNNFAGRAINEFKILVKEAHKRGIEVIMDVVLNHTAEGNEKGPIFSFRGVDNSVYYMLAPKGEFYNYSGCGNTFNCNHPVVRQFILDCLRYWVTEMHVDGFRFDLGSIMSRSSSLWDAANVYGADVEGDLLTTGTPISCPPVIDMISNDPILRGVKLIAEAWDAGGLYQVGMFPHWGIWSEWNGKFRDVVRQFIKGTDGFSGAFAECLCGSPNLYQGGRKPWHSINFICAHDGFTLADLVTYNNKNNLANGEENNDGENHNYSWNCGEEGDFASISVKRLRKRQMRNFFVSLMVSQGVPMIYMGDEYGHTKGGNNNTYCHDNYMNYFRWDKKEEAHSDFFRFCRILIKFRDECESLGLNDFPTAKRLQWHGLAPEIPNWSETSRFVAFSLVDSVKKEIYVAFNTSHLATLVSLPNRPGYRWEPFVDTSKPSPYDCITPDLPERETAMKQYRHFLDANVYPMLSYSSIILLLSPIKDP

SEQ ID NO: 32104 - protein, 643 aa, Arabidopsis thaliana
  misc_feature (1)..(643): Ceres Seq. ID no. 13592180
MLYGYRFDGKFSPEEGHYYDSSNILLDPYAKAIISRDEFGVLGPDDNCWPQMACMVPTREEEFDWEGDMHLKLPQKDLVIYEMHVRGFTRHESSKIEFPGTYQGVAEKLDHLKELGINCIELMPCHEFNELEYYSYNTILGDHRVNFWGYSTIGFFSPMIRYASASSNNFAGRAINEFKILVKEAHKRGIEVIMDVVLNHTAEGNEKGPIFSFRGVDNSVYYMLAPKGEFYNYSGCGNTFNCNHPVVRQFILDCLRYWVTEMHVDGFRFDLGSIMSRSSSLWDAANVYGADVEGDLLTTGTPISCPPVIDMISNDPILRGVKLIAEAWDAGGLYQVGMFPHWGIWSEWNGKFRDVVRQFIKGTDGFSGAFAECLCGSPNLYQGGRKPWHSINFICAHDGFTLADLVTYNNKNNLANGEENNDGENHNYSWNCGEEGDFASISVKRLRKRQMRNFFVSLMVSQGVPMIYMGDEYGHTKGGNNNTYCHDNYMNYFRWDKKEEAHSDFFRFCRILIKFRDECESLGLNDFPTAKRLQWHGLAPEIPNWSETSRFVAFSLVDSVKKEIYVAFNTSHLATLVSLPNRPGYRWEPFVDTSKPSPYDCITPDLPERETAMKQYRHFLDANVYPMLSYSSIILLLSPIKDP

SEQ ID NO: 32105 - DNA, 675 bp, Arabidopsis thaliana
  misc_feature (1)..(675): Ceres Seq. ID no. 13592185
atgaataattataatatgaacccatctctcttccaaaattacacttggaacaacatcatcaacagcagcaacaacaacaacaagaatgatgatcatcatcatcaacataataatgatccaatcggtatggccatggaccagtacacacagctccatatcttcaatcctttctcttcttctcatttccctcctctctcttcttccctcacaaccaccactcttctctccggagatcaagaagacgacgaagacgaagaagaacctctagaggaactcggtgctatgaaggaaatgatgtacaagatcgcagccatgcaatcggttgacatcgacccagcaaccgtcaagaaacccaaacgccgtaacgtgaggatctccgacgaccctcagagtgtggcggctagacatcgccgtgagagaatcagtgagaggatcagaattcttcagagactcgtgccaggtggcactaaaatggatacggcttcaatgctcgatgaagctatacgctatgtcaagttcttgaaacggcagatccggctactcaataataataccggatatactcctccgccgccgcaagatcaagcttctcaggcggtgacgacgtcatgggtttcaccgccaccaccgccaagtttcggccgtgggggaagaggagtaggagaattaatctag

SEQ ID NO: 32106 - protein, 224 aa, Arabidopsis thaliana
  misc_feature (1)..(224): Ceres Seq. ID no. 13592186
MNNYNMNPSLFQNYTWNNIINSSNNNNKNDDHHHQHNNDPIGMAMDQYTQLHIFNPFSSSHFPPLSSSLTTTTLLSGDQEDDEDEEEPLEELGAMKEMMYKIAAMQSVDIDPATVKKPKRRNVRISDDPQSVAARHRRERISERIRILQRLVPGGTKMDTASMLDEAIRYVKFLKRQIRLLNNNTGYTPPPPQDQASQAVTTSWVSPPPPPSFGRGGRGVGELI

SEQ ID NO: 32107 - protein, 219 aa, Arabidopsis thaliana; identical to SEQ ID NO: 28780
  misc_feature (1)..(219): Ceres Seq. ID no. 13592187

SEQ ID NO: 32108 - protein, 182 aa, Arabidopsis thaliana; identical to SEQ ID NO: 28781
  misc_feature (1)..(182): Ceres Seq. ID no. 13592188

SEQ ID NO: 32109 - DNA, 2456 bp, Arabidopsis thaliana
  misc_feature (1)..(2456): Ceres Seq. ID no. 13592201
gatcccaagaaatcgaaacacaaagcaatgggctcttcttctccattaacaaggagaaacagagcaccaccatcctctgtttcctctgtttatctaatctttctctgtttcttcctctactttttaaatttctcaaacgctcaatcatcgccggttttcgcctgcgacgtagctgcaaacccttctctcgccgcctatggtttctgcaacaccgttttgaagatcgaataccgagtcgctgatctggtcgcgaggctcacgttgcaagaaaagatcgggtttttagtgagtaaagctaacggcgtgactcgtcttgggattccaacgtatgaatggtggtctgaagcacttcacggcgtttcttacatcggacccggcacgcatttttctagccaagttcccggagctacgagtttcccgcaggttatactcaccgccgcttctttcaacgtatctctgtttcaagccattggcaaggtcgtctcaacggaagcgagggcaatgtacaacgtgggattagccggactaacgtattggtcaccgaacgtgaacatattccgagatccaagatggggaagagggcaagagactccaggagaagatccattgctcgctagtaagtatgcttcagggtacgttaagggtcttcaagagactgacggtggcgattctaaccgtctcaaagtcgccgcctgctgcaaacactataccgcttacgatgtcgataattggaaaggcgtagaacgttacagtttcaacgccgtggtgactcaacaagatatggatgatacgtatcaaccaccgttcaagagttgtgtggttgatgggaatgtggcgagtgttatgtgttcttacaatcaagttaacggcaaaccgacatgcgctgatccagatctgctctctggtgttatccgcggtgaatggaaattaaatgggtacattgtttcagattgtgattcagtagatgtcttgtataagaaccaacactatacaaagactccagctgaagctgcagccatatctatattggcaggtttggatttaaactgtggttcattcttgggtcaacatacagaggaagcagttaagtcgggtttggtaaacgaggcagctatcgataaagcgatttcgaacaactttttgacccttatgcgtttaggattctttgatggaaacccaaagaaccaaatctatggcgggttaggtcctaccgacgtttgcacgtctgcgaatcaagagctagcagcagatgcagcaagacaaggcattgttctactcaagaatactggatgcttaccgctttctcctaaatcgatcaaaacactagccgtgattggaccaaacgcgaatgtcaccaaaacaatgattggaaactacgaaggcacgccgtgtaaatacacaacaccactacaaggactagccgggacggtatctacaacatatctaccaggctgctccaatgtagcttgtgctgtagcggatgtagccggcgccacgaaactagcagccactgcagatgtgtctgtgcttgtgatcggtgccgatcaatcaatcgaggcagagagccgagacagagtcgacctgcatcttcctggacagcaacaagagctggtgatccaagtggctaaagcagcaaaaggaccggtcttgctcgtcattatgtccggtggaggtttcgatattacattcgctaagaatgacccaaagatcgccggaattttgtgggttggttatcccggagaagccggtggtatcgccattgctgatatcatctttggccgttataatccaagtgggaaattaccgatgacgtggtatccacagtcgtatgtagagaaagttccgatgacaataatgaacatgagacccgataaagcaagcgggtatccgggtcggacttaccgattctacaccggagaaacagtatacgcattcggagatggactcagctacaccaaattcagtcacactttagtcaaagctccaagtctcgtttctctcggtctcgaagagaatcacgtttgccgatcatcggaatgtcaatcgctagacgcgatcggaccgcactgcgaaaacgctgtctccggcggtggatcggcgtttgaagttcatatcaaggtacgaaacggaggagatagagaagggattcacacggtgtttctattcacgacgccgccggcgattcacggatcgccgaggaagcatttggtaggattcgagaagattcgattggggaagagggaagaagcggtggttaggtttaaggtagagatatgtaaagatctgagtgtggttgatgagattgggaagaggaagattggtttgggaaagcatcttcttcatgtcggagatttaaaacattccttaagcattagaatctgattctatatttttatttgaggaagaaaaaaagaatattaatatgcttaagcttttgcaagttggaaaagaaaagt

SEQ ID NO: 32110 - protein, 793 aa, Arabidopsis thaliana
  misc_feature (1)..(793): Ceres Seq. ID no. 13592202
DPKKSKHKAMGSSSPLTRRNRAPPSSVSSVYLIFLCFFLYFLNFSNAQSSPVFACDVAANPSLAAYGFCNTVLKIEYRVADLVARLTLQEKIGFLVSKANGVTRLGIPTYEWWSEALHGVSYIGPGTHFSSQVPGATSFPQVILTAASFNVSLFQAIGKVVSTEARAMYNVGLAGLTYWSPNVNIFRDPRWGRGQETPGEDPLLASKYASGYVKGLQETDGGDSNRLKVAACCKHYTAYDVDNWKGVERYSFNAVVTQQDMDDTYQPPFKSCVVDGNVASVMCSYNQVNGKPTCADPDLLSGVIRGEWKLNGYIVSDCDSVDVLYKNQHYTKTPAEAAAISILAGLDLNCGSFLGQHTEEAVKSGLVNEAAIDKAISNNFLTLMRLGFFDGNPKNQIYGGLGPTDVCTSANQELAADAARQGIVLLKNTGCLPLSPKSIKTLAVIGPNANVTKTMIGNYEGTPCKYTTPLQGLAGTVSTTYLPGCSNVACAVADVAGATKLAATADVSVLVIGADQSIEAESRDRVDLHLPGQQQELVIQVAKAAKGPVLLVIMSGGGFDITFAKNDPKIAGILWVGYPGEAGGIAIADIIFGRYNPSGKLPMTWYPQSYVEKVPMTIMNMRPDKASGYPGRTYRFYTGETVYAFGDGLSYTKFSHTLVKAPSLVSLGLEENHVCRSSECQSLDAIGPHCENAVSGGGSAFEVHIKVRNGGDREGIHTVFLFTTPPAIHGSPRKHLVGFEKIRLGKREEAVVRFKVEICKDLSVVDEIGKRKIGLGKHLLHVGDLKHSLSIRI

SEQ ID NO: 32111 - protein, 784 aa, Arabidopsis thaliana
  misc_feature (1)..(784): Ceres Seq. ID no. 13592203
MGSSSPLTRRNRAPPSSVSSVYLIFLCFFLYFLNFSNAQSSPVFACDVAANPSLAAYGFCNTVLKIEYRVADLVARLTLQEKIGFLVSKANGVTRLGIPTYEWWSEALHGVSYIGPGTHFSSQVPGATSFPQVILTAASFNVSLFQAIGKVVSTEARAMYNVGLAGLTYWSPNVNIFRDPRWGRGQETPGEDPLLASKYASGYVKGLQETDGGDSNRLKVAACCKHYTAYDVDNWKGVERYSFNAVVTQQDMDDTYQPPFKSCVVDGNVASVMCSYNQVNGKPTCADPDLLSGVIRGEWKLNGYIVSDCDSVDVLYKNQHYTKTPAEAAAISILAGLDLNCGSFLGQHTEEAVKSGLVNEAAIDKAISNNFLTLMRLGFFDGNPKNQIYGGLGPTDVCTSANQELAADAARQGIVLLKNTGCLPLSPKSIKTLAVIGPNANVTKTMIGNYEGTPCKYTTPLQGLAGTVSTTYLPGCSNVACAVADVAGATKLAATADVSVLVIGADQSIEAESRDRVDLHLPGQQQELVIQVAKAAKGPVLLVIMSGGGFDITFAKNDPKIAGILWVGYPGEAGGIAIADIIFGRYNPSGKLPMTWYPQSYVEKVPMTIMNMRPDKASGYPGRTYRFYTGETVYAFGDGLSYTKFSHTLVKAPSLVSLGLEENHVCRSSECQSLDAIGPHCENAVSGGGSAFEVHIKVRNGGDREGIHTVFLFTTPPAIHGSPRKHLVGFEKIRLGKREEAVVRFKVEICKDLSVVDEIGKRKIGLGKHLLHVGDLKHSLSIRI

SEQ ID NO: 32112 - protein, 626 aa, Arabidopsis thaliana
  misc_feature (1)..(626): Ceres Seq. ID no. 13592204
MYNVGLAGLTYWSPNVNIFRDPRWGRGQETPGEDPLLASKYASGYVKGLQETDGGDSNRLKVAACCKHYTAYDVDNWKGVERYSFNAVVTQQDMDDTYQPPFKSCVVDGNVASVMCSYNQVNGKPTCADPDLLSGVIRGEWKLNGYIVSDCDSVDVLYKNQHYTKTPAEAAAISILAGLDLNCGSFLGQHTEEAVKSGLVNEAAIDKAISNNFLTLMRLGFFDGNPKNQIYGGLGPTDVCTSANQELAADAARQGIVLLKNTGCLPLSPKSIKTLAVIGPNANVTKTMIGNYEGTPCKYTTPLQGLAGTVSTTYLPGCSNVACAVADVAGATKLAATADVSVLVIGADQSIEAESRDRVDLHLPGQQQELVIQVAKAAKGPVLLVIMSGGGFDITFAKNDPKIAGILWVGYPGEAGGIAIADIIFGRYNPSGKLPMTWYPQSYVEKVPMTIMNMRPDKASGYPGRTYRFYTGETVYAFGDGLSYTKFSHTLVKAPSLVSLGLEENHVCRSSECQSLDAIGPHCENAVSGGGSAFEVHIKVRNGGDREGIHTVFLFTTPPAIHGSPRKHLVGFEKIRLGKREEAVVRFKVEICKDLSVVDEIGKRKIGLGKHLLHVGDLKHSLSIRI

SEQ ID NO: 32113 - DNA, 2014 bp, Arabidopsis thaliana
  misc_feature (1)..(2014): Ceres Seq. ID no. 13592209
ggttatcgaaccaatggagaccccactccctcctttatcgcaactaaccccaaatcctactcccgccgccgccgtctcttccgctattccggcgccagttaagagcgtagccgttcagcaaccgatcgatggatctccacgcgccgttgctactgataccggaggtattcctgagccacttgcggctgttcccggcgctaagcttcgtcttatgtgcagttttggtggccacatcatgcctcgtccacacgacaaatcgttgacgtactccggcggcgagactcgtattgtggttgttgatcgacgtgcgtcactgtcttcgctccgatctcgtctctctagtatgcttctcaacggccggtcctttactctcaagtaccagctccctagcgaagatctcgattcactcgtcaccatcactaccgatgaagatctggagaacatgatcgaggaatacgatcgcgcggcttcgtcagcgacggcgactgctacgcaacggctccggttgttccttttcgctaacaagctcgagaccgccgctactatgggatctctgcttgacggcacgaaatctgacacatggttcgtcgatgctctgaatcaatctggtttgcttcctcgtggtttatcagattccgccgccgtgaataataccttggtgaatctcgacgaagctagcggcggagagaccgagatccaaaaccttgaaactaatgttggtggcgagaacaataagcgaggggatttggttgctaacggtgtgatttcgcatcaggagatgcatatgagctcgatgcctgattctccaatgatggaagccgctggttcttcgataggatcttcttcttcatctccttccacatccaatttgccaccgattcgcgttagagtcagtgaggaccagaggatagaggaacaattggcacagatgaccttctcaaacatgcaaactcagaggcaatttgatgatggcgttagcttgatggcaaatcggccaatgatgattccacctggtgccatgaacgatgctgcgatggcgtataacaacgcacctggtgatggtactgctcccgcaagcaatggccatgtctcacctgaagacgatcgatccgaattaggtgtatcaactggctacaggaagccacctttgccgatgcaaccagtaacgatcccacctagaactgttggaggctatggcttgacatcccctgattctgttgcaagtgatactagcatttcttctgctacttcattttcaaagccgatgtactaccaagaccaacctccagctctgccaagagctcctccagtggcacagcctgaaaccacctcggcccaaagctctcaagtcttacctcagactgaaaacacttcagcccaaaccacctcccatgtcttatctcagccaggtacgtacacaactatggatcaacaacaacaacaacctctggctcaacaacctttcttacaccaaggcgttcagtatatccctcacccatcacaatacataccaatttactctcatcagcaacaaaactaccctgtttacgtgatgtccgtcccacaatctcagcagtatatcccagcaggaactcccccgctctacccgaactcaaaacccggcacaaactcgagacctgaagctgcccagaacgtttaccgagctgctccccctcaggttattcagcttcagcaacagcatcagtacatgggttacgctggagctcctcaacatagcacaaacgcaaacgccaattacggtactggagctcctcaacatagcacaaacgcaaacgccaactacggtggaccctttgaatacacaaactctccaaacgagacagtgtattaccacacacaagctcctgctgcaaacactgccattccattagcgtctccataccaaagcatgacaccagcagcagccgcagcagctctagccgatatgtccaagcaaatggctcttgacggcggcaaacagcaacagcatatggctgcgtctcagccgctttaa

SEQ ID NO: 32114 - protein, 670 aa, Arabidopsis thaliana
  misc_feature (1)..(670): Ceres Seq. ID no. 13592210
VIEPMETPLPPLSQLTPNPTPAAAVSSAIPAPVKSVAVQQPIDGSPRAVATDTGGIPEPLAAVPGAKLRLMCSFGGHIMPRPHDKSLTYSGGETRIVVVDRRASLSSLRSRLSSMLLNGRSFTLKYQLPSEDLDSLVTITTDEDLENMIEEYDRAASSATATATQRLRLFLFANKLETAATMGSLLDGTKSDTWFVDALNQSGLLPRGLSDSAAVNNTLVNLDEASGGETEIQNLETNVGGENNKRGDLVANGVISHQEMHMSSMPDSPMMEAAGSSIGSSSSSPSTSNLPPIRVRVSEDQRIEEQLAQMTFSNMQTQRQFDDGVSLMANRPMMIPPGAMNDAAMAYNNAPGDGTAPASNGHVSPEDDRSELGVSTGYRKPPLPMQPVTIPPRTVGGYGLTSPDSVASDTSISSATSFSKPMYYQDQPPALPRAPPVAQPETTSAQSSQVLPQTENTSAQTTSHVLSQPGTYTTMDQQQQQPLAQQPFLHQGVQYIPHPSQYIPIYSHQQQNYPVYVMSVPQSQQYIPAGTPPLYPNSKPGTNSRPEAAQNVYRAAPPQVIQLQQQHQYMGYAGAPQHSTNANANYGTGAPQHSTNANANYGGPFEYTNSPNETVYYHTQAPAANTAIPLASPYQSMTPAAAAAALADMSKQMALDGGKQQQHMAASQPL

SEQ ID NO: 32115 - protein, 666 aa, Arabidopsis thaliana
  misc_feature (1)..(666): Ceres Seq. ID no. 13592211
METPLPPLSQLTPNPTPAAAVSSAIPAPVKSVAVQQPIDGSPRAVATDTGGIPEPLAAVPGAKLRLMCSFGGHIMPRPHDKSLTYSGGETRIVVVDRRASLSSLRSRLSSMLLNGRSFTLKYQLPSEDLDSLVTITTDEDLENMIEEYDRAASSATATATQRLRLFLFANKLETAATMGSLLDGTKSDTWFVDALNQSGLLPRGLSDSAAVNNTLVNLDEASGGETEIQNLETNVGGENNKRGDLVANGVISHQEMHMSSMPDSPMMEAAGSSIGSSSSSPSTSNLPPIRVRVSEDQRIEEQLAQMTFSNMQTQRQFDDGVSLMANRPMMIPPGAMNDAAMAYNNAPGDGTAPASNGHVSPEDDRSELGVSTGYRKPPLPMQPVTIPPRTVGGYGLTSPDSVASDTSISSATSFSKPMYYQDQPPALPRAPPVAQPETTSAQSSQVLPQTENTSAQTTSHVLSQPGTYTTMDQQQQQPLAQQPFLHQGVQYIPHPSQYIPIYSHQQQNYPVYVMSVPQSQQYIPAGTPPLYPNSKPGTNSRPEAAQNVYRAAPPQVIQLQQQHQYMGYAGAPQHSTNANANYGTGAPQHSTNANANYGGPFEYTNSPNETVYYHTQAPAANTAIPLASPYQSMTPAAAAAALADMSKQMALDGGKQQQHMAASQPL

SEQ ID NO: 32116 - protein, 600 aa, Arabidopsis thaliana
  misc_feature (1)..(600): Ceres Seq. ID no. 13592212
MCSFGGHIMPRPHDKSLTYSGGETRIVVVDRRASLSSLRSRLSSMLLNGRSFTLKYQLPSEDLDSLVTITTDEDLENMIEEYDRAASSATATATQRLRLFLFANKLETAATMGSLLDGTKSDTWFVDALNQSGLLPRGLSDSAAVNNTLVNLDEASGGETEIQNLETNVGGENNKRGDLVANGVISHQEMHMSSMPDSPMMEAAGSSIGSSSSSPSTSNLPPIRVRVSEDQRIEEQLAQMTFSNMQTQRQFDDGVSLMANRPMMIPPGAMNDAAMAYNNAPGDGTAPASNGHVSPEDDRSELGVSTGYRKPPLPMQPVTIPPRTVGGYGLTSPDSVASDTSISSATSFSKPMYYQDQPPALPRAPPVAQPETTSAQSSQVLPQTENTSAQTTSHVLSQPGTYTTMDQQQQQPLAQQPFLHQGVQYIPHPSQYIPIYSHQQQNYPVYVMSVPQSQQYIPAGTPPLYPNSKPGTNSRPEAAQNVYRAAPPQVIQLQQQHQYMGYAGAPQHSTNANANYGTGAPQHSTNANANYGGPFEYTNSPNETVYYHTQAPAANTAIPLASPYQSMTPAAAAAALADMSKQMALDGGKQQQHMAASQPL

SEQ ID NO: 32117 - DNA, 1830 bp, Arabidopsis thaliana
  misc_feature (1)..(1830): Ceres Seq. ID no. 13592216
gaacaactaaactaattgacatttgacaataaaaagctgaactttattatgcatctctaggctttttccttgagagtttctctctttgaagtcatttacgtatatatatataaacccttgcaccattcttcttcgtcttgttaagcttttaagaatctctactcacattttctctgtaaaaatgggaactaggttccaatcattcttgctcgtgttcttgctttcatgtttaatcctcatatcaactgcctcgtgtgagcgaaatggtgatggaacgattagaattggattgaagaagaggaaactagaccggagcaacaggctagcttctcagctttttttgaaaaaccgagggtctcattggtctcccaaacactattttcgcctgaacgatgaaaatgcggatatggttccgctgaaaaactatttggatgctcaatactatggtgacattaccattggtactcctcctcagaagttcactgtgatctttgatactggtagctccaatctctggataccatctactaaatgttacctatcggttgcttgttatttccactccaagtacaaggctagccagtcatcgtcatatagaaagaacggaaaacccgcgtctatccgctatgggacgggtgctatttctggttactttagcaatgatgatgttaaagttggtgatattgttgtgaaagagcaggaattcatagaggctactagtgagcctggtataacattcttgctagcaaagtttgatggtatcctcggtttgggtttcaaagagatttctgtaggaaactcaactccggtttggtataacatggtagaaaaaggtttagttaaggaaccgattttttcgttctggcttaaccgtaacccgaaagatccagaaggcggtgagattgttttcggtggagtcgacccgaagcacttcaaaggagagcatacttttgttcctgtgacacataaaggttactggcagtttgacatgggtgatctccaaattgctggcaaaccaaccggatattgtgctaaaggttgttctgctattgctgattccggaacttctctgctcaccggtccatcgactgtcatcacgatgatcaatcacgcgataggagcacaaggaattgtaagccgtgaatgcaaggccgtggtggatcaatacggaaaaaccatgttgaattctcttctagctcaggaggatccgaagaaagtatgctcacaaattggagtctgcgcttatgatggtacacagagtgtgagtatggggatccagtcagttgtagacgatggaacatcgggtcttttaaaccaagcgatgtgcagtgcttgcgaaatggcagccgtgtggatggagagcgaattgactcagaatcaaacacaagaacgcatactcgcttatgctgctgagctatgtgaccatataccaacccaaaaccaacaatcagcagtggactgtgggagggtttcgtcgatgcctatagtcacattctcaattggtggcagaagctttgatctaactcctcaagactatatattcaagatcggggaaggagttgagtctcagtgcaccagcggtttcacggcaatggatattgctccgcctcgtggacctctctggatcttgggtgatatcttcatgggaccataccacacagtgttcgattatgggaaaggaagagttggattcgccaaagctgcttaaacaatatctcttctttaataccctcgttttttatatgatgtttgtgaatgtgtttgtaataacttaaaacatattgctatcctagaatggtatcatcttaatacagatttttatttggtttc

SEQ ID NO: 32118 - protein, 508 aa, Arabidopsis thaliana
  misc_feature (1)..(508): Ceres Seq. ID no. 13592217
MGTRFQSFLLVFLLSCLILISTASCERNGDGTIRIGLKKRKLDRSNRLASQLFLKNRGSHWSPKHYFRLNDENADMVPLKNYLDAQYYGDITIGTPPQKFTVIFDTGSSNLWIPSTKCYLSVACYFHSKYKASQSSSYRKNGKPASIRYGTGAISGYFSNDDVKVGDIVVKEQEFIEATSEPGITFLLAKFDGILGLGFKEISVGNSTPVWYNMVEKGLVKEPIFSFWLNRNPKDPEGGEIVFGGVDPKHFKGEHTFVPVTHKGYWQFDMGDLQIAGKPTGYCAKGCSAIADSGTSLLTGPSTVITMINHAIGAQGIVSRECKAVVDQYGKTMLNSLLAQEDPKKVCSQIGVCAYDGTQSVSMGIQSVVDDGTSGLLNQAMCSACEMAAVWMESELTQNQTQERILAYAAELCDHIPTQNQQSAVDCGRVSSMPIVTFSIGGRSFDLTPQDYIFKIGEGVESQCTSGFTAMDIAPPRGPLWILGDIFMGPYHTVFDYGKGRVGFAKAA

SEQ ID NO: 32119 - protein, 433 aa, Arabidopsis thaliana
  misc_feature (1)..(433): Ceres Seq. ID no. 13592218
MVPLKNYLDAQYYGDITIGTPPQKFTVIFDTGSSNLWIPSTKCYLSVACYFHSKYKASQSSSYRKNGKPASIRYGTGAISGYFSNDDVKVGDIVVKEQEFIEATSEPGITFLLAKFDGILGLGFKEISVGNSTPVWYNMVEKGLVKEPIFSFWLNRNPKDPEGGEIVFGGVDPKHFKGEHTFVPVTHKGYWQFDMGDLQIAGKPTGYCAKGCSAIADSGTSLLTGPSTVITMINHAIGAQGIVSRECKAVVDQYGKTMLNSLLAQEDPKKVCSQIGVCAYDGTQSVSMGIQSVVDDGTSGLLNQAMCSACEMAAVWMESELTQNQTQERILAYAAELCDHIPTQNQQSAVDCGRVSSMPIVTFSIGGRSFDLTPQDYIFKIGEGVESQCTSGFTAMDIAPPRGPLWILGDIFMGPYHTVFDYGKGRVGFAKAA

SEQ ID NO: 32120 - protein, 295 aa, Arabidopsis thaliana
  misc_feature (1)..(295): Ceres Seq. ID no. 13592219
MVEKGLVKEPIFSFWLNRNPKDPEGGEIVFGGVDPKHFKGEHTFVPVTHKGYWQFDMGDLQIAGKPTGYCAKGCSAIADSGTSLLTGPSTVITMINHAIGAQGIVSRECKAVVDQYGKTMLNSLLAQEDPKKVCSQIGVCAYDGTQSVSMGIQSVVDDGTSGLLNQAMCSACEMAAVWMESELTQNQTQERILAYAAELCDHIPTQNQQSAVDCGRVSSMPIVTFSIGGRSFDLTPQDYIFKIGEGVESQCTSGFTAMDIAPPRGPLWILGDIFMGPYHTVFDYGKGRVGFAKAA

SEQ ID NO: 32121 - DNA, 1790 bp, Arabidopsis thaliana
  misc_feature (1)..(1790): Ceres Seq. ID no. 13592250
aagaagaagaaatagaaaagttcggattttgatctgtgtggttggattgttgcaagaactaaaccagacccacctttcaaaactttgtccctaacgaacaacattaatcattcattctcctgtgtgagctcttcctcttcttctgtttaaggttctttctccttcttcttttgagggggtttaaagcttcagtggacgaaaagagtttgttttttgggtgacaatgggaggagtggtgcatcttagcacggcgaagttagctagaggtttcttagtgtgtttatgtctttggggttttttctcgctatcatacgccgcaaggtccggcgtatcaaagcagaagtttgaagtgaagaaacatttgaacaggctgaacaaacctgctgtcaaaagcattcagagttcagatggtgatgtgattgactgtgttccaatctcaaagcaaccagcttttgatcatccgttcctcaaagatcacaagattcagatgaagcctaattaccaccctgaaggactctttgatgacaacaaagtgtctgctcctaaatcaaatgagaaagaagggcatattcctcagttgtggcatcgatatggtaaatgttctgaaggaactattcccatgaggaggacaaaggaagatgatgttttgagagcaagttcagttaaaagatatggcaagaagaagcgtagaagtgtccctttacctaaatctgcagaacctgaccttattaaccaaagtggtcaccagcatgccatagcttatgtagaaggagataagtactatggagctaaggctactataaatgtgtgggagccaaagatacagcagcagaatgagttcagcttgtcacagatatggcttcttggtggctcattcggacaagatcttaatagcatcgaagctggttggcaggtgagcccggatctgtatggtgacaataacacgagactcttcacttactggactagtgatgcatatcaagctaccggttgctacaatcttctttgctccggttttattcaaatcaacagtgacatagcaatgggagcaagcatttccccggtctctggatatcgtaactcgcagtacgatatcagtattctgatctggaaggatcctaaagagggacactggtggatgcaatttgggaacggctatgttttaggctattggccatcttttctcttctcctacttgacagaaagtgcatcgatgattgaatggggaggagaagtcgtgaactcacaatcagatggccagcacacttcaacacaaatgggcagtggtaaatttccagaagaaggctttagcaaagcaagttacttcaggaacattcaggtggttgatgggtcaaacaacctcaaggcacctaaaggacttggaacattcactgaacagtctaactgttatgatgttcaaaccggaagcaatgatgattggggtcattacttttactatggaggccctggtaaaaaccagaagtgtccataagctaggctccaagtagtagtggctcgtctctcgagttatcttgtcttgtgaattcaccttgtttctttctacacacactcactcaaatccgccttcttgggtagtttttagggatggttaaagttatgtaatggtaaaagtttggtgtctttttctccatgtaagtaggtggggaagaagtggaaaggtgtggcttaagtttctttgaaaactcagaaactttggcccttagtgtaattttactttgtctcctttgtattgtgatttgtttaaacaagtgaatgaatctctctttctc

SEQ ID NO: 32122 - protein, 422 aa, Arabidopsis thaliana
  misc_feature (1)..(422): Ceres Seq. ID no. 13592251
MGGVVHLSTAKLARGFLVCLCLWGFFSLSYAARSGVSKQKFEVKKHLNRLNKPAVKSIQSSDGDVIDCVPISKQPAFDHPFLKDHKIQMKPNYHPEGLFDDNKVSAPKSNEKEGHIPQLWHRYGKCSEGTIPMRRTKEDDVLRASSVKRYGKKKRRSVPLPKSAEPDLINQSGHQHAIAYVEGDKYYGAKATINVWEPKIQQQNEFSLSQIWLLGGSFGQDLNSIEAGWQVSPDLYGDNNTRLFTYWTSDAYQATGCYNLLCSGFIQINSDIAMGASISPVSGYRNSQYDISILIWKDPKEGHWWMQFGNGYVLGYWPSFLFSYLTESASMIEWGGEVVNSQSDGQHTSTQMGSGKFPEEGFSKASYFRNIQVVDGSNNLKAPKGLGTFTEQSNCYDVQTGSNDDWGHYFYYGGPGKNQKCP

SEQ ID NO: 32123 - protein, 334 aa, Arabidopsis thaliana
  misc_feature (1)..(334): Ceres Seq. ID no. 13592252
MKPNYHPEGLFDDNKVSAPKSNEKEGHIPQLWHRYGKCSEGTIPMRRTKEDDVLRASSVKRYGKKKRRSVPLPKSAEPDLINQSGHQHAIAYVEGDKYYGAKATINVWEPKIQQQNEFSLSQIWLLGGSFGQDLNSIEAGWQVSPDLYGDNNTRLFTYWTSDAYQATGCYNLLCSGFIQINSDIAMGASISPVSGYRNSQYDISILIWKDPKEGHWWMQFGNGYVLGYWPSFLFSYLTESASMIEWGGEVVNSQSDGQHTSTQMGSGKFPEEGFSKASYFRNIQVVDGSNNLKAPKGLGTFTEQSNCYDVQTGSNDDWGHYFYYGGPGKNQKCP

SEQ ID NO: 32124 - protein, 290 aa, Arabidopsis thaliana
  misc_feature (1)..(290): Ceres Seq. ID no. 13592253
MRRTKEDDVLRASSVKRYGKKKRRSVPLPKSAEPDLINQSGHQHAIAYVEGDKYYGAKATINVWEPKIQQQNEFSLSQIWLLGGSFGQDLNSIEAGWQVSPDLYGDNNTRLFTYWTSDAYQATGCYNLLCSGFIQINSDIAMGASISPVSGYRNSQYDISILIWKDPKEGHWWMQFGNGYVLGYWPSFLFSYLTESASMIEWGGEVVNSQSDGQHTSTQMGSGKFPEEGFSKASYFRNIQVVDGSNNLKAPKGLGTFTEQSNCYDVQTGSNDDWGHYFYYGGPGKNQKCP

SEQ ID NO: 32125 - DNA, 1793 bp, Arabidopsis thaliana
  misc_feature (1)..(1793): Ceres Seq. ID no. 13592254
aaaacatagctagataaaaatcaagcttcacctaattagtgtattcccccaaatttctcaattctcactaatggctttggtcagcttacttgaaatctccattgctttcttttgtttccttatctttcgaattttcctgatcagcaagaaaccacaccgttcatttctcacaaactggccgctcctgggcatgcttccgggtttacttaccgtgctccctcgagtttacgactttataaccgaggttcttgaggacggcaacttaaactatcttttcataggcccttttttagggggcatcgacatgttgttcaccgttgatcctgctaatatcaatcacatcatgagctcaaactttgcgaattacccgaaaggaaccgaattcaagaagttatttgacgttttgggagatgggattttcaacgcggattcagatttgtggaaggatctaaggaaatcttctcaaagcatgatgaatcatcccgattttcaaaggttttcattagctacaagcttgagtaagctagagaaagggcttgtgccacttcttgatcatgttgctaaagagaaactcgtcgtggacttacaagatgttttccaaagattcacgtttgacactacctttgttttagcaaccgggtatgatccaggttgtctctcggtggaaatgccggaaatcgagtttgcaagagccttagacgatgcagaggaagctattttctacagacatttcaagccggaggtggtgtggaagatgcaaagattgattggggttggagctgagttgaagctgaaaagagctcacgcgattttcgatcgtgtttgctctaagtgcatagcttctaagagagatgagatcagccaagggattgattcttcttcttctaaagatttgttgatgtcttctataaatgttgacacgactaagtacaagttgttgaatccaagtgatgacagattccttagagacacaatcttgtccttcatgttagctggtagagacacaacaggctcagcgctcacttggttcttctggcttctatgcaataaccaagaagccatgaccaagattcgtcaagaaatcaacacaaatctatttccaagaaacaagaccgacgacggttctgtttcttatgattctgattcattcaatccccaagaggtaaagaagttggtgtatttacacggcgcggtttgtgaagccctcaggctctatccacctgttccctttaaccacaagtctcctgctaaacccgacgtgcttccaagcggccacaaagtcaaggccaattcgaggattttgttctgtctttactcattagggagaatgaaatcggtttggggagaagatgcaatggaatttaaaccggagagatggatttctgagagtggaagatcggtacatgagccatcttataagttcctatcgtttaacgccggtccaagaacttgtttggggaaagaagtggctatgacgcaaatgaagacagtggctgtgaaaatcatacaaaattatgacattaatgtcgttgaagggcacaagatcaagccagctccttcggttattctccacatgaagcatggtcttaaagtcactgtctctaaaagatgtttgtcttgaatgttttaactagaatgtagaaactgtggcagttgacgaagatgatttctatgatatgaagacatctcaaatcatgcatcctgaaatataatgttattgttaaacataatttctaaatttaagtaaaatatataaatgttggtaagaaaattaataatttcctttttatttt

SEQ ID NO: 32126 - protein, 516 aa, Arabidopsis thaliana
  misc_feature (1)..(516): Ceres Seq. ID no. 13592255
MALVSLLEISIAFFCFLIFRIFLISKKPHRSFLTNWPLLGMLPGLLTVLPRVYDFITEVLEDGNLNYLFIGPFLGGIDMLFTVDPANINHIMSSNFANYPKGTEFKKLFDVLGDGIFNADSDLWKDLRKSSQSMMNHPDFQRFSLATSLSKLEKGLVPLLDHVAKEKLVVDLQDVFQRFTFDTTFVLATGYDPGCLSVEMPEIEFARALDDAEEAIFYRHFKPEVVWKMQRLIGVGAELKLKRAHAIFDRVCSKCIASKRDEISQGIDSSSSKDLLMSSINVDTTKYKLLNPSDDRFLRDTILSFMLAGRDTTGSALTWFFWLLCNNQEAMTKIRQEINTNLFPRNKTDDGSVSYDSDSFNPQEVKKLVYLHGAVCEALRLYPPVPFNHKSPAKPDVLPSGHKVKANSRILFCLYSLGRMKSVWGEDAMEFKPERWISESGRSVHEPSYKFLSFNAGPRTCLGKEVAMTQMKTVAVKIIQNYDINVVEGHKIKPAPSVILHMKHGLKVTVSKRCLS

SEQ ID NO: 32127 - protein, 476 aa, Arabidopsis thaliana
  misc_feature (1)..(476): Ceres Seq. ID no. 13592256
MLPGLLTVLPRVYDFITEVLEDGNLNYLFIGPFLGGIDMLFTVDPANINHIMSSNFANYPKGTEFKKLFDVLGDGIFNADSDLWKDLRKSSQSMMNHPDFQRFSLATSLSKLEKGLVPLLDHVAKEKLVVDLQDVFQRFTFDTTFVLATGYDPGCLSVEMPEIEFARALDDAEEAIFYRHFKPEVVWKMQRLIGVGAELKLKRAHAIFDRVCSKCIASKRDEISQGIDSSSSKDLLMSSINVDTTKYKLLNPSDDRFLRDTILSFMLAGRDTTGSALTWFFWLLCNNQEAMTKIRQEINTNLFPRNKTDDGSVSYDSDSFNPQEVKKLVYLHGAVCEALRLYPPVPFNHKSPAKPDVLPSGHKVKANSRILFCLYSLGRMKSVWGEDAMEFKPERWISESGRSVHEPSYKFLSFNAGPRTCLGKEVAMTQMKTVAVKIIQNYDINVVEGHKIKPAPSVILHMKHGLKVTVSKRCLS

SEQ ID NO: 32128 - protein, 438 aa, Arabidopsis thaliana
  misc_feature (1)..(438): Ceres Seq. ID no. 13592257
MLFTVDPANINHIMSSNFANYPKGTEFKKLFDVLGDGIFNADSDLWKDLRKSSQSMMNHPDFQRFSLATSLSKLEKGLVPLLDHVAKEKLVVDLQDVFQRFTFDTTFVLATGYDPGCLSVEMPEIEFARALDDAEEAIFYRHFKPEVVWKMQRLIGVGAELKLKRAHAIFDRVCSKCIASKRDEISQGIDSSSSKDLLMSSINVDTTKYKLLNPSDDRFLRDTILSFMLAGRDTTGSALTWFFWLLCNNQEAMTKIRQEINTNLFPRNKTDDGSVSYDSDSFNPQEVKKLVYLHGAVCEALRLYPPVPFNHKSPAKPDVLPSGHKVKANSRILFCLYSLGRMKSVWGEDAMEFKPERWISESGRSVHEPSYKFLSFNAGPRTCLGKEVAMTQMKTVAVKIIQNYDINVVEGHKIKPAPSVILHMKHGLKVTVSKRCLS

SEQ ID NO: 32129 - DNA, 1447 bp, Arabidopsis thaliana
  misc_feature (1)..(1447): Ceres Seq. ID no. 13592262
ctaaatgtactgaaaagaaacaccagtttaattaattatacttccctcatatataactatcaaccaagtacaaaacttttgtcaattctcaaaatcaactttcaccacataattatctaacatgtgtatgttccaaaaccagtttaaatagaattacttttcagaaaatacatgtatattaactctatctaataaagaagaaacacatacttatctcatagattccattcataaaactatgctttagtgagtaagaaaaccagtaatcaaacacaaattgacaagacactatatggatgtaaaaagtggggaaaaatggtgataaatagtagagaaaattaaaaagaaaaaaaatattcctttataaatgtatatacccatctcttcaccagcacaaccttaccttccattttctgcaacttctccaaatctcatactttccagaaaatcattttcccaagaaaaataaaactttcccctttgttcttctccccccaacagcaatcacggcgtaccaatcggagctaggaggagattcctctcccttgaggaaatctgggagaggaaagatcgaaatcaaacggatcgagaacacaacgaatcgtcaagtcactttttgcaaacgtagaaatggtttgctcaagaaagcttacgagctctctgttctttgtgatgctgaagtcgcactcatcgtcttctctagccgtggtcgtctctatgagtactctaacaacagtgtaaaagggactattgagaggtacaagaaggcaatatcggacaattctaacaccggatcggtggcagaaattaatgcacagtattatcaacaagaatcagccaaattgcgtcaacaaataatcagcatacaaaactccaacaggcaattgatgggtgagacgatagggtcaatgtctcccaaagagctcaggaacttggaaggcagattagagagaagtattacccgaatccgatccaagaagaatgagctcttattttctgaaatcgactacatgcagaaaagagaagttgatttgcataacgataaccagattcttcgtgcaaagatagctgaaaatgagaggaacaatccgagtataagtctaatgccaggaggatctaactacgagcagcttatgccaccacctcaaacgcaatctcaaccgtttgattcacggaattatttccaagtcgcggcattgcaacctaacaatcaccattactcatccgcgggtcgccaagaccaaaccgctctccagttagtgtaatataggctgaaggaaatggccgggagtgaataaaaaccagaattgggttgagcaagcaatataaagctaatgcatgttatatatatatttatcccatgaatgttgtatcagtgaattttatgcttatgttgatgtgaaattaatatcttaaagacatgtcattaatgtgcttaatttgcttc

SEQ ID NO: 32130 - protein, 125 aa, Arabidopsis thaliana
  misc_feature (1)..(125): Ceres Seq. ID no. 13592263
MGETIGSMSPKELRNLEGRLERSITRIRSKKNELLFSEIDYMQKREVDLHNDNQILRAKIAENERNNPSISLMPGGSNYEQLMPPPQTQSQPFDSRNYFQVAALQPNNHHYSSAGRQDQTALQLV

SEQ ID NO: 32131 - protein, 118 aa, Arabidopsis thaliana
  misc_feature (1)..(118): Ceres Seq. ID no. 13592264
MSPKELRNLEGRLERSITRIRSKKNELLFSEIDYMQKREVDLHNDNQILRAKIAENERNNPSISLMPGGSNYEQLMPPPQTQSQPFDSRNYFQVAALQPNNHHYSSAGRQDQTALQLV

SEQ ID NO: 32132 - protein, 84 aa, Arabidopsis thaliana
  misc_feature (1)..(84): Ceres Seq. ID no. 13592265
MQKREVDLHNDNQILRAKIAENERNNPSISLMPGGSNYEQLMPPPQTQSQPFDSRNYFQVAALQPNNHHYSSAGRQDQTALQLV

SEQ ID NO: 32133 - DNA, 1058 bp, Arabidopsis thaliana
  misc_feature (1)..(1058): Ceres Seq. ID no. 13592274
gaattatctatcacaccaccactctctctctaatctatctatccgagaatggccaagatgggcttgaaacccgacccggctactactaaccagacccacaataatgccaaggagattcgttacagaggcgttaggaagcgtccttggggccgttatgccgccgagatccgagatccgggcaagaaaacccgcgtctggcttggcactttcgatacggctgaagaggcggcgcgtgcttacgatacggcggcgcgtgattttcgtggtgctaaggctaagaccaatttcccaacttttctcgagctgagtgaccagaaggtccctaccggtttcgcgcgtagccctagccagagcagcacgctcgactgtgcttctcctccgacgttagttgtgccttcagcgacggctgggaatgttcccccgcagctcgagcttagtctcggcggaggaggcggcggctcgtgttatcagatcccgatgtcgcgtcctgtctactttttggacctgatggggatcggtaacgtaggtcgtggtcagcctcctcctgtgacatcggcgtttagatcgccggtggtgcatgttgcgacgaagatggcttgtggtgcccaaagcgactctgattcgtcatcggtcgttgatttcgaaggtgggatggagaagagatctcagctgttagatctagatcttaatttgcctcctccatcggaacaggcctgagcttttaacggtgtcgtttcaattcgaagcgcatgcgtttcttcttctttttgagctgtgaaaattcgttttctcatagtttttcctctctctctctctcagtctaaatttattaccagtttttagaaagaaaaaacagattaaatctgagagagaaaaatataattttagctgacatggatcgttatgtacatattattacataaccggagatctgaacttttgttgtgtgcttttaattttttgcgacttggtttcaccccatgttgtttctctattttttttactactttttttttttttgttcttccaaattttcaatcaataatttggtaatcttc

SEQ ID NO: 32134 - protein, 222 aa, Arabidopsis thaliana
  misc_feature (1)..(222): Ceres Seq. ID no. 13592275
MAKMGLKPDPATTNQTHNNAKEIRYRGVRKRPWGRYAAEIRDPGKKTRVWLGTFDTAEEAARAYDTAARDFRGAKAKTNFPTFLELSDQKVPTGFARSPSQSSTLDCASPPTLVVPSATAGNVPPQLELSLGGGGGGSCYQIPMSRPVYFLDLMGIGNVGRGQPPPVTSAFRSPVVHVATKMACGAQSDSDSSSVVDFEGGMEKRSQLLDLDLNLPPPSEQA

SEQ ID NO: 32135 - protein, 219 aa, Arabidopsis thaliana
  misc_feature (1)..(219): Ceres Seq. ID no. 13592276
MGLKPDPATTNQTHNNAKEIRYRGVRKRPWGRYAAEIRDPGKKTRVWLGTFDTAEEAARAYDTAARDFRGAKAKTNFPTFLELSDQKVPTGFARSPSQSSTLDCASPPTLVVPSATAGNVPPQLELSLGGGGGGSCYQIPMSRPVYFLDLMGIGNVGRGQPPPVTSAFRSPVVHVATKMACGAQSDSDSSSVVDFEGGMEKRSQLLDLDLNLPPPSEQA

SEQ ID NO: 32136 - DNA, 1581 bp, Arabidopsis thaliana
  misc_feature (1)..(1581): Ceres Seq. ID no. 13592277
acttttcacgtttcagttttcaacaatctctctctatccattctctatcaaattctaaaatcaaaaatggctctgcatttgagatcttctttttcatcaaaatcgactttactcaatattctcagacacaacctcggtttcggttctaggagccacgtgactcggcatatccgccaaatcctaccacatgaccccccgcttcgaggttcacagaatccaattagccgtctctgtaataccatggcggagccagagacactctctagttttgttcagcacgaatacgccaacaatcatcaggtaatggactttccaggaggaaaggtagctttcacacctgagattcaattcatatcagaatctgataaagagcgtgttccttgctaccgtgttcttgatgacaatggccaacttatcaccaacagccagtttgttcaggttagcgaggaggttgcggtgaagatatatagcgatatggttactcttcaaattatggataacatattctacgaagctcaaagacaaggcagactttccttttacgctactgcaatcggtgaagaggccattaatattgcatcagctgctgctctcactcctcaagatgttatctttcctcagtacagagagcctggtgttctactatggcgtggtttcacgcttcaagaatttgcaaaccagtgttttgggaacaaatctgattatggaaaaggcaggcagatgcccgtccactatggctctaacaagctcaattattttaccgtttctgcaaccattgctacgcagttaccaaacgcggttggtgctgcttattccttaaagatggacaagaaggatgcatgtgcggtcacatattttggcgatggtggcacgagtgagggagatttccatgctgctttgaatattgcagcagttatggaagctcctgttttatttatttgccggaacaatggatgggccatcagtactcccacctcagatcagttccgaagtgatggtgtagtggtcaaaggccgtgcttatggaattcgaagtatacgtgtggatggaaatgatgcacttgccatgtacagtgcggtacatactgctcgcgaaatggcaattagagaacagaggccaatcttgattgaggccttaacataccgtgtaggacaccattcaacatcagatgattccactaggtaccgctctgcaggtgagatagagtggtggaacaaagcaagaaacccactgtctaggtttaggacatggattgaaagtaatggctggtggagtgataaaacggaatcggatctgagaagcagaatcaaaaaagagatgttagaagcgctccgggttgcagagaagactgagaaaccgaatctgcagaacatgttctcagatgtctacgatgttcctccatctaacctcagggaacaagaacttctggtgaggcagacgatcaatagtcacccacaagattacccatcagatgtgcctctttaggtagactctagttgtatgctttgtgtagtaatttatgtaagccaaataatctacattgtgtattgaaatcttttattgaaatcgagaccaatattc

SEQ ID NO: 32137 - protein, 494 aa, Arabidopsis thaliana
  misc_feature (1)..(494): Ceres Seq. ID no. 13592278
TFHVSVFNNLSLSILYQILKSKMALHLRSSFSSKSTLLNILRHNLGFGSRSHVTRHIRQILPHDPPLRGSQNPISRLCNTMAEPETLSSFVQHEYANNHQVMDFPGGKVAFTPEIQFISESDKERVPCYRVLDDNGQLITNSQFVQVSEEVAVKIYSDMVTLQIMDNIFYEAQRQGRLSFYATAIGEEAINIASAAALTPQDVIFPQYREPGVLLWRGFTLQEFANQCFGNKSDYGKGRQMPVHYGSNKLNYFTVSATIATQLPNAVGAAYSLKMDKKDACAVTYFGDGGTSEGDFHAALNIAAVMEAPVLFICRNNGWAISTPTSDQFRSDGVVVKGRAYGIRSIRVDGNDALAMYSAVHTAREMAIREQRPILIEALTYRVGHHSTSDDSTRYRSAGEIEWWNKARNPLSRFRTWIESNGWWSDKTESDLRSRIKKEMLEALRVAEKTEKPNLQNMFSDVYDVPPSNLREQELLVRQTINSHPQDYPSDVPL

SEQ ID NO: 32138 - protein, 472 aa, Arabidopsis thaliana
  misc_feature (1)..(472): Ceres Seq. ID no. 13592279
MALHLRSSFSSKSTLLNILRHNLGFGSRSHVTRHIRQILPHDPPLRGSQNPISRLCNTMAEPETLSSFVQHEYANNHQVMDFPGGKVAFTPEIQFISESDKERVPCYRVLDDNGQLITNSQFVQVSEEVAVKIYSDMVTLQIMDNIFYEAQRQGRLSFYATAIGEEAINIASAAALTPQDVIFPQYREPGVLLWRGFTLQEFANQCFGNKSDYGKGRQMPVHYGSNKLNYFTVSATIATQLPNAVGAAYSLKMDKKDACAVTYFGDGGTSEGDFHAALNIAAVMEAPVLFICRNNGWAISTPTSDQFRSDGVVVKGRAYGIRSIRVDGNDALAMYSAVHTAREMAIREQRPILIEALTYRVGHHSTSDDSTRYRSAGEIEWWNKARNPLSRFRTWIESNGWWSDKTESDLRSRIKKEMLEALRVAEKTEKPNLQNMFSDVYDVPPSNLREQELLVRQTINSHPQDYPSDVPL

SEQ ID NO: 32139 - protein, 414 aa, Arabidopsis thaliana
  misc_feature (1)..(414): Ceres Seq. ID no. 13592280
MAEPETLSSFVQHEYANNHQVMDFPGGKVAFTPEIQFISESDKERVPCYRVLDDNGQLITNSQFVQVSEEVAVKIYSDMVTLQIMDNIFYEAQRQGRLSFYATAIGEEAINIASAAALTPQDVIFPQYREPGVLLWRGFTLQEFANQCFGNKSDYGKGRQMPVHYGSNKLNYFTVSATIATQLPNAVGAAYSLKMDKKDACAVTYFGDGGTSEGDFHAALNIAAVMEAPVLFICRNNGWAISTPTSDQFRSDGVVVKGRAYGIRSIRVDGNDALAMYSAVHTAREMAIREQRPILIEALTYRVGHHSTSDDSTRYRSAGEIEWWNKARNPLSRFRTWIESNGWWSDKTESDLRSRIKKEMLEALRVAEKTEKPNLQNMFSDVYDVPPSNLREQELLVRQTINSHPQDYPSDVPL

SEQ ID NO: 32140 - DNA, 983 bp, Arabidopsis thaliana
  misc_feature (1)..(983): Ceres Seq. ID no. 13592284
gaggaagagaagaagaaaaaatgttgggaagcataagcctcatctcctgcaacttctctcgccttccacgtcttcttaaaccctccactcgacctcaaaccctaacacaatcctcaagcctccttcttcttcttcaatcacgagcttcttcttcaccacatagaattgcccttttcccgaaatacgagaagaaagtcacattcttccatatctgcaaaagctcttcaaacaacccagaagaaccagagaagactcaaattcaagatgaaggaagagactggtctagctcaattttgctttttgcgctttggggtgcgctcttgtactattgcttcaatctcgctcctgatcaaacacccacacaagacttgtactttttgaaaaagcttttgaatttgaaaggtgatgatggttttagaatgaatcagatccttgttgggttatggtacatcatgggtttgtggcctttggtttatgccatgctcttgcttcccactggtacaagtaaaacaccggcttggcctttcgttgtgctttcctttttcggtggtgtttatgctttgttaccttattttgcactgtggaatcctccttctcctcctgtttcagagactgagctgagacaatggcctttgaatgttctggaatcaaaagtaactgctggggtcactctagttgcaggactgggtataattctttattcagttgtcggtaatgccggtgattggacggagttttatcagtactttcgagagagcaaatttattcatgttacaagtcttgatttctgtttactctctgcatttgctccgttttgggtttacaacgacatgaccacccgaaaatggtttgataaaggcagttggctgttaccggtatcggtgattccattcttgggaccttctttgtatctactcctacgaccagcagtgtcagagacgatagctcccaaagatactgcatcatctgacccaaatcaatag

SEQ ID NO: 32141 - protein, 326 aa, Arabidopsis thaliana
  misc_feature (1)..(326): Ceres Seq. ID no. 13592285
GREEEKMLGSISLISCNFSRLPRLLKPSTRPQTLTQSSSLLLLLQSRASSSPHRIALFPKYEKKVTFFHICKSSSNNPEEPEKTQIQDEGRDWSSSILLFALWGALLYYCFNLAPDQTPTQDLYFLKKLLNLKGDDGFRMNQILVGLWYIMGLWPLVYAMLLLPTGTSKTPAWPFVVLSFFGGVYALLPYFALWNPPSPPVSETELRQWPLNVLESKVTAGVTLVAGLGIILYSVVGNAGDWTEFYQYFRESKFIHVTSLDFCLLSAFAPFWVYNDMTTRKWFDKGSWLLPVSVIPFLGPSLYLLLRPAVSETIAPKDTASSDPNQ

SEQ ID NO: 32142 - protein, 320 aa, Arabidopsis thaliana
  misc_feature (1)..(320): Ceres Seq. ID no. 13592286
MLGSISLISCNFSRLPRLLKPSTRPQTLTQSSSLLLLLQSRASSSPHRIALFPKYEKKVTFFHICKSSSNNPEEPEKTQIQDEGRDWSSSILLFALWGALLYYCFNLAPDQTPTQDLYFLKKLLNLKGDDGFRMNQILVGLWYIMGLWPLVYAMLLLPTGTSKTPAWPFVVLSFFGGVYALLPYFALWNPPSPPVSETELRQWPLNVLESKVTAGVTLVAGLGIILYSVVGNAGDWTEFYQYFRESKFIHVTSLDFCLLSAFAPFWVYNDMTTRKWFDKGSWLLPVSVIPFLGPSLYLLLRPAVSETIAPKDTASSDPNQ

SEQ ID NO: 32143 - protein, 187 aa, Arabidopsis thaliana
  misc_feature (1)..(187): Ceres Seq. ID no. 13592287
MNQILVGLWYIMGLWPLVYAMLLLPTGTSKTPAWPFVVLSFFGGVYALLPYFALWNPPSPPVSETELRQWPLNVLESKVTAGVTLVAGLGIILYSVVGNAGDWTEFYQYFRESKFIHVTSLDFCLLSAFAPFWVYNDMTTRKWFDKGSWLLPVSVIPFLGPSLYLLLRPAVSETIAPKDTASSDPNQ

SEQ ID NO: 32144 - DNA, 4420 bp, Arabidopsis thaliana
  misc_feature (1)..(4420): Ceres Seq. ID no. 13592289
atggagaaacagaggagagaagaaagcagctttcaacaacctccatggattcctcagacacccatgaagccattttcaccgatctgcccatacacggtggaggatcaatatcatagcagtcaattggaggaaaggagatttgttgggaacaaggatatgagtggtcttgatcacttgtcttttggggatttgcttgctctagctaacactgcatccctcatattctctggtcagactccaatacctacaagaaacacagaggttatgcaaaaaggtactgaagaagtggagagtttgagctcagtgagtaacaatgttgctgaacagatcctcaagactcctgaaaaacctaagaggaagaagcatcggccaaaggttcgtagagaagctaaacccaagagggagcctaaaccacgagctccgaggaagtctgttgtcaccgatggtcaagaaagcaaaacaccaaagaggaaatatgtgcggaagaaggttgaagtcagtaaggatcaagacgctactccggttgaatcatcagcagctgttgaaacttcaactcgtcctaagaggctctgtagacgagtcttggattttgaagccgaaaatggagaaaaccagaccaacggtgacattagagaagcaggtgagatggaatcagctcttcaagagaagcagttagattctgggaatcaagagttaaaagattgccttctttcggctcctagcacgcccaagagaaagcgcagccaaggtaaaagaaagggagttcaaccaaagaaaaatggcagtaatctagaagaagtcgatatttcgatggcgcaagctgcaaagagaagacaaggaccaacttgttgcgacatgaatctatcagggattcagtatgatgagcaatgtgactaccagaaaatgcattggttgtattccccaaacttgcaacagggagggatgagatatgatgccatttgcagcaaagtattctctggacaacagcacaattatgtttctgcctttcacgctacgtgctacagttccacatctcagctcagtgctaatagagtcctaaccgttgaagaaagacgagaaggtatctttcaaggaaggcaagagtctgagctaaatgttctctcggataagatagacacgccgatcaagaagaaaacaacaggccatgctcgattccggaatttgtcttcaatgaataaacttgtggaagttcctgagcatttaacctcaggatattgtagcaagccacagcaaaataataagattcttgttgatacgcgggtgactgtgagcaaaaagaagccaaccaagtctgagaaatcacaaaccaaacagaaaaatcttcttccgaatctttgccgttttccaccttcatttactggtctttctccagatgaactttggaaacgacgtaactcgatcgaaacaatcagtgagctattgcgtctattagacatcaacagggagcattctgaaactgctctcgttccttacacaatgaatagccagattgtactctttggtggtggcgctggagcaattgtgcctgtaactcctgttaaaaaaccacgcccacgaccaaaggttgatctagacgatgagacagacagagtgtggaaactgctattggagaatattaatagcgaaggtgttgacggatcagacgagcagaaggcgaaatggtgggaggaagaacgtaatgtgtttcgaggacgagctgactcatttattgcaaggatgcaccttgtacaaggggatcgacgttttacgccttggaagggatccgtcgtggattctgttgttggagtatttctcactcaaaatgtttcagaccatctctcaagttcggctttcatgtcgttggcttcccagttccctgtcccttttgtaccgagcagtaactttgacgctggaacaagctcgatgccttctattcaaataacgtacttggactcagaggaaacgatgtcaagcccacccgatcacaatcacagttctgttactttgaaaaatacacagcctgatgaggagaaggattatgtacctagcaatgaaacctccagaagcagtagtgagattgccatctcagcccatgaatcagttgacaaaaccacggattcaaaggagtatgttgattcagatcgaaaaggctcaagtgtagaggttgataagacggatgagaagtgtcgtgtcctgaacctgtttccatctgaagattctgcacttacatgtcaacattcgatggtgtctgatgctcctcaaaatacagagagagcaggatcaagctcagagatcgacttagaaggagagtatcgtacttcctttatgaagctcctacagggggtacaagtctctctagaagattccaatcaagtatcaccaaatatgtctccgggtgattgtagctcagaaattaagggtttccagtcaatgaaagagcccacaaaatcctctgttgatagtagtgaacctggttgttgctctcagcaagatggggatgttttgagttgtcagaaacctaccttaaaagaaaaagggaaaaaggttttgaaggaggaaaaaaaagcgtttgactgggattgtttaagaagagaagcccaagctagagcaggaattagagaaaaaacaagaagtacaatggacaccgtggattggaaggcaatacgagcagcagatgttaaggaagttgctgaaacaatcaagagtcgcgggatgaaccataaacttgcagaacgtatacagggcttccttgatcgactggtaaatgaccatggaagtatcgatcttgaatggttgagagatgttccaccagataaagcaaaagaatatcttctgagctttaacggattgggactgaaaagtgtggagtgtgtgcggcttctaacacttcaccatcttgcctttccagttgatacaaatgttgggcgcatagccgtcagacttggatgggtgccccttcagccgctcccagagtcacttcagttgcatcttctggaaatgtatcctatgcttgaatctattcaaaagtatctttggccccgtctctgcaaactcgaccaaaaaacattgtatgagttgcactaccagatgattacttttggaaaggtcttttgcacaaagagcaaacctaattgcaatgcatgtccgatgaaaggagaatgcagacattttgccagtgcgtttgcaagtgcaaggcttgctttaccaagtacagagaaaggtatggggacacctgataaaaaccctttgcctctacacctgccagagccattccagagagagcaagggtctgaagtagtacagcactcagaaccagcaaaaaaggtcacatgttgtgaaccaatcatcgaagagcctgcttcaccggagccagaaaccgcagaagtatcaatagctgacatagaggaggcgttttttgaggatccagaagaaattcctaccatcaggctaaacatggatgcatttaccagtaacttgaagaagataatggaacacaacaaggaacttcaagacggaaacatgtccagcgctttagttgcacttactgctgaaactgcttctcttccaatgcctaagctcaagaatatcagccagttaaggacagaacaccgagtttacgaacttccagacgagcatcctcttctagctcagttggaaaagagagaacctgatgatccatgttcttatttgcttgctatatggacgccaggtgagacggctgattctattcaaccgtctgttagtacgtgcatattccaagcaaatggtatgctttgtgacgaggagacttgtttctcctgcaacagcatcaaggagactagatctcaaattgtgagagggacaattttgattccttgtagaacagcgatgaggggtagttttcctctaaatggaacgtactttcaagtaaatgaggtgtttgcggatcatgcatccagcctaaacccaatcaatgtcccaagggaattgatatgggaattacctcgaagaacggtctattttggtacctctgttcctacgatattcaaaggtttatcaactgagaagatacaggcttgcttttggaaagggtacgtatgtgtacgtggatttgatcgaaagacgaggggaccgaagcctttgattgcaagattgcacttcccggcgagcaaactgaagggacaacaagctaacctcgcctaatccgttggcaagcaaacaaatacaagcttatggttaagagtgagagagcacactgttccaatctagttaatgtaagaaagtgaaaacgtaaagttaacagtcctagagttgtacaaggtttctaaatcccattttagtttcgtcttaaatttgtatcaaacacttgtcacaaaaaacagacccgtagctgtgtaaactctctgttcccttcgtttggtttatatctgaatttacggtt

SEQ ID NO: 32145 - protein, 1393 aa, Arabidopsis thaliana
  misc_feature (1)..(1393): Ceres Seq. ID no. 13592290
MEKQRREESSFQQPPWIPQTPMKPFSPICPYTVEDQYHSSQLEERRFVGNKDMSGLDHLSFGDLLALANTASLIFSGQTPIPTRNTEVMQKGTEEVESLSSVSNNVAEQILKTPEKPKRKKHRPKVRREAKPKREPKPRAPRKSVVTDGQESKTPKRKYVRKKVEVSKDQDATPVESSAAVETSTRPKRLCRRVLDFEAENGENQTNGDIREAGEMESALQEKQLDSGNQELKDCLLSAPSTPKRKRSQGKRKGVQPKKNGSNLEEVDISMAQAAKRRQGPTCCDMNLSGIQYDEQCDYQKMHWLYSPNLQQGGMRYDAICSKVFSGQQHNYVSAFHATCYSSTSQLSANRVLTVEERREGIFQGRQESELNVLSDKIDTPIKKKTTGHARFRNLSSMNKLVEVPEHLTSGYCSKPQQNNKILVDTRVTVSKKKPTKSEKSQTKQKNLLPNLCRFPPSFTGLSPDELWKRRNSIETISELLRLLDINREHSETALVPYTMNSQIVLFGGGAGAIVPVTPVKKPRPRPKVDLDDETDRVWKLLLENINSEGVDGSDEQKAKWWEEERNVFRGRADSFIARMHLVQGDRRFTPWKGSVVDSVVGVFLTQNVSDHLSSSAFMSLASQFPVPFVPSSNFDAGTSSMPSIQITYLDSEETMSSPPDHNHSSVTLKNTQPDEEKDYVPSNETSRSSSEIAISAHESVDKTTDSKEYVDSDRKGSSVEVDKTDEKCRVLNLFPSEDSALTCQHSMVSDAPQNTERAGSSSEIDLEGEYRTSFMKLLQGVQVSLEDSNQVSPNMSPGDCSSEIKGFQSMKEPTKSSVDSSEPGCCSQQDGDVLSCQKPTLKEKGKKVLKEEKKAFDWDCLRREAQARAGIREKTRSTMDTVDWKAIRAADVKEVAETIKSRGMNHKLAERIQGFLDRLVNDHGSIDLEWLRDVPPDKAKEYLLSFNGLGLKSVECVRLLTLHHLAFPVDTNVGRIAVRLGWVPLQPLPESLQLHLLEMYPMLESIQKYLWPRLCKLDQKTLYELHYQMITFGKVFCTKSKPNCNACPMKGECRHFASAFASARLALPSTEKGMGTPDKNPLPLHLPEPFQREQGSEVVQHSEPAKKVTCCEPIIEEPASPEPETAEVSIADIEEAFFEDPEEIPTIRLNMDAFTSNLKKIMEHNKELQDGNMSSALVALTAETASLPMPKLKNISQLRTEHRVYELPDEHPLLAQLEKREPDDPCSYLLAIWTPGETADSIQPSVSTCIFQANGMLCDEETCFSCNSIKETRSQIVRGTILIPCRTAMRGSFPLNGTYFQVNEVFADHASSLNPINVPRELIWELPRRTVYFGTSVPTIFKGLSTEKIQACFWKGYVCVRGFDRKTRGPKPLIARLHFPASKLKGQQANLA

SEQ ID NO: 32146 - protein, 1372 aa, Arabidopsis thaliana
  misc_feature (1)..(1372): Ceres Seq. ID no. 13592291
MKPFSPICPYTVEDQYHSSQLEERRFVGNKDMSGLDHLSFGDLLALANTASLIFSGQTPIPTRNTEVMQKGTEEVESLSSVSNNVAEQILKTPEKPKRKKHRPKVRREAKPKREPKPRAPRKSVVTDGQESKTPKRKYVRKKVEVSKDQDATPVESSAAVETSTRPKRLCRRVLDFEAENGENQTNGDIREAGEMESALQEKQLDSGNQELKDCLLSAPSTPKRKRSQGKRKGVQPKKNGSNLEEVDISMAQAAKRRQGPTCCDMNLSGIQYDEQCDYQKMHWLYSPNLQQGGMRYDAICSKVFSGQQHNYVSAFHATCYSSTSQLSANRVLTVEERREGIFQGRQESELNVLSDKIDTPIKKKTTGHARFRNLSSMNKLVEVPEHLTSGYCSKPQQNNKILVDTRVTVSKKKPTKSEKSQTKQKNLLPNLCRFPPSFTGLSPDELWKRRNSIETISELLRLLDINREHSETALVPYTMNSQIVLFGGGAGAIVPVTPVKKPRPRPKVDLDDETDRVWKLLLENINSEGVDGSDEQKAKWWEEERNVFRGRADSFIARMHLVQGDRRFTPWKGSVVDSVVGVFLTQNVSDHLSSSAFMSLASQFPVPFVPSSNFDAGTSSMPSIQITYLDSEETMSSPPDHNHSSVTLKNTQPDEEKDYVPSNETSRSSSEIAISAHESVDKTTDSKEYVDSDRKGSSVEVDKTDEKCRVLNLFPSEDSALTCQHSMVSDAPQNTERAGSSSEIDLEGEYRTSFMKLLQGVQVSLEDSNQVSPNMSPGDCSSEIKGFQSMKEPTKSSVDSSEPGCCSQQDGDVLSCQKPTLKEKGKKVLKEEKKAFDWDCLRREAQARAGIREKTRSTMDTVDWKAIRAADVKEVAETIKSRGMNHKLAERIQGFLDRLVNDHGSIDLEWLRDVPPDKAKEYLLSFNGLGLKSVECVRLLTLHHLAFPVDTNVGRIAVRLGWVPLQPLPESLQLHLLEMYPMLESIQKYLWPRLCKLDQKTLYELHYQMITFGKVFCTKSKPNCNACPMKGECRHFASAFASARLALPSTEKGMGTPDKNPLPLHLPEPFQREQGSEVVQHSEPAKKVTCCEPIIEEPASPEPETAEVSIADIEEAFFEDPEEIPTIRLNMDAFTSNLKKIMEHNKELQDGNMSSALVALTAETASLPMPKLKNISQLRTEHRVYELPDEHPLLAQLEKREPDDPCSYLLAIWTPGETADSIQPSVSTCIFQANGMLCDEETCFSCNSIKETRSQIVRGTILIPCRTAMRGSFPLNGTYFQVNEVFADHASSLNPINVPRELIWELPRRTVYFGTSVPTIFKGLSTEKIQACFWKGYVCVRGFDRKTRGPKPLIARLHFPASKLKGQQANLA

SEQ ID NO: 32147 - protein, 1341 aa, Arabidopsis thaliana
  misc_feature (1)..(1341): Ceres Seq. ID no. 13592292
MSGLDHLSFGDLLALANTASLIFSGQTPIPTRNTEVMQKGTEEVESLSSVSNNVAEQILKTPEKPKRKKHRPKVRREAKPKREPKPRAPRKSVVTDGQESKTPKRKYVRKKVEVSKDQDATPVESSAAVETSTRPKRLCRRVLDFEAENGENQTNGDIREAGEMESALQEKQLDSGNQELKDCLLSAPSTPKRKRSQGKRKGVQPKKNGSNLEEVDISMAQAAKRRQGPTCCDMNLSGIQYDEQCDYQKMHWLYSPNLQQGGMRYDAICSKVFSGQQHNYVSAFHATCYSSTSQLSANRVLTVEERREGIFQGRQESELNVLSDKIDTPIKKKTTGHARFRNLSSMNKLVEVPEHLTSGYCSKPQQNNKILVDTRVTVSKKKPTKSEKSQTKQKNLLPNLCRFPPSFTGLSPDELWKRRNSIETISELLRLLDINREHSETALVPYTMNSQIVLFGGGAGAIVPVTPVKKPRPRPKVDLDDETDRVWKLLLENINSEGVDGSDEQKAKWWEEERNVFRGRADSFIARMHLVQGDRRFTPWKGSVVDSVVGVFLTQNVSDHLSSSAFMSLASQFPVPFVPSSNFDAGTSSMPSIQITYLDSEETMSSPPDHNHSSVTLKNTQPDEEKDYVPSNETSRSSSEIAISAHESVDKTTDSKEYVDSDRKGSSVEVDKTDEKCRVLNLFPSEDSALTCQHSMVSDAPQNTERAGSSSEIDLEGEYRTSFMKLLQGVQVSLEDSNQVSPNMSPGDCSSEIKGFQSMKEPTKSSVDSSEPGCCSQQDGDVLSCQKPTLKEKGKKVLKEEKKAFDWDCLRREAQARAGIREKTRSTMDTVDWKAIRAADVKEVAETIKSRGMNHKLAERIQGFLDRLVNDHGSIDLEWLRDVPPDKAKEYLLSFNGLGLKSVECVRLLTLHHLAFPVDTNVGRIAVRLGWVPLQPLPESLQLHLLEMYPMLESIQKYLWPRLCKLDQKTLYELHYQMITFGKVFCTKSKPNCNACPMKGECRHFASAFASARLALPSTEKGMGTPDKNPLPLHLPEPFQREQGSEVVQHSEPAKKVTCCEPIIEEPASPEPETAEVSIADIEEAFFEDPEEIPTIRLNMDAFTSNLKKIMEHNKELQDGNMSSALVALTAETASLPMPKLKNISQLRTEHRVYELPDEHPLLAQLEKREPDDPCSYLLAIWTPGETADSIQPSVSTCIFQANGMLCDEETCFSCNSIKETRSQIVRGTILIPCRTAMRGSFPLNGTYFQVNEVFADHASSLNPINVPRELIWELPRRTVYFGTSVPTIFKGLSTEKIQACFWKGYVCVRGFDRKTRGPKPLIARLHFPASKLKGQQANLA

SEQ ID NO: 32148 - DNA, 2228 bp, Arabidopsis thaliana
  misc_feature (1)..(2228): Ceres Seq. ID no. 13592297
ggaaagataaccacagaacacaaaaactcattcattaagaatgagaaagaaagtcccaaaaaccttttttgctctgaaaaagcaacgcaaagttttgaaaaatctcacacctttttcacttctctgttaccacttgtgtttcccctttggcatttttctcggttgtcattaatgagagttcctaaaatcatcatcatcaagtgtaacttctctctctttctctatctctatctcaaagctctgaactttggagagatcatggtttgtgtttgatttctcaagtttggttttttttacccttttggaggatctgagaggagaaatttgcttttttttggaaaatggggagaaaaaagtttgaagcttttggttttgtctgcttaatctcactgcttcttctgtttaattcgttatggcttgcctcttctaacatggaaggtgatgcactgcacagtttgagagctaatctagttgatccaaataatgtcttgcaaagctgggatcctacgcttgttaatccgtgtacttggtttcacgtaacgtgtaacaacgagaacagtgttataagagtcgatcttgggaatgcagacttgtctggtcagttggttcctcagctaggtcagctcaagaacttgcagtacttggagctttatagtaataacataaccgggccggttccaagcgatcttgggaatctgacaaacttagtgagcttggatctttacttgaacagcttcactggtccaattccagattctctaggaaagctattcaagcttcgctttcttcggctcaacaataacagtctcaccggaccaattcccatgtcattgactaatatcatgacccttcaagttttggatctgtcgaacaaccgattatccggatctgttcctgataatggttccttctcgctcttcactcccatcagttttgctaacaacttggatctatgcggcccagttactagccgtccttgtcctggatctcccccgttttctcctccaccaccttttataccacctcccatagttcctacaccaggtgggtatagtgctactggagccattgcgggaggagttgctgctggtgctgctttactatttgctgcccctgctttagcttttgcttggtggcgtagaagaaaacctcaagaattcttctttgatgttcctgccgaagaggaccctgaggttcacttggggcagcttaagcggttctctctacgggaacttcaagtagcaactgatagcttcagcaacaagaacattttgggccgaggtgggttcggaaaagtctacaaaggccgtcttgctgatggaacacttgttgcagtcaaacggcttaaagaagagcgaaccccaggtggcgagctccagtttcagacagaagtggagatgataagcatggccgttcacagaaatctcctcaggctacgcggtttctgtatgacccctaccgagagattgcttgtttatccttacatggctaatggaagtgtcgcttcctgtttgagagaacgtccaccatcacagttgcctctagcctggtcaataagacagcaaatcgcgctaggatcagcgaggggtttgtcttatcttcatgatcattgcgaccccaaaattattcaccgtgatgtgaaagctgctaatattctgttggacgaggaatttgaggcggtggtaggtgatttcgggttagctagacttatggactataaagatactcatgtcacaacggctgtgcgtgggactattggacacattgctcctgagtatctctcaactggaaaatcttcagagaaaactgatgtttttggctacgggatcatgcttttggaactgattacaggtcagagagcttttgatcttgcaagactggcgaatgacgatgacgttatgctcctagattgggtgaaagggcttttgaaggagaagaagctggagatgcttgtggatcctgacctgcaaagcaattacacagaagcagaagtagaacagctcatacaagtggctcttctctgcacacagagctcacctatggaacgacctaagatgtctgaggttgttcgaatgcttgaaggtgacggtttagcggagaaatgggacgagtggcagaaagtggaagttctcaggcaagaagtggagctctcttctcaccccacctctgactggatccttgattcgactgataatcttcatgctatggagttgtctggtccaagataa

SEQ ID NO: 32149 - protein, 628 aa, Arabidopsis thaliana
  misc_feature (1)..(628): Ceres Seq. ID no. 15221085
MGRKKFEAFGFVCLISLLLLFNSLWLASSNMEGDALHSLRANLVDPNNVLQSWDPTLVNPCTWFHVTCNNENSVIRVDLGNADLSGQLVPQLGQLKNLQYLELYSNNITGPVPSDLGNLTNLVSLDLYLNSFTGPIPDSLGKLFKLRFLRLNNNSLTGPIPMSLTNIMTLQVLDLSNNRLSGSVPDNGSFSLFTPISFANNLDLCGPVTSRPCPGSPPFSPPPPFIPPPIVPTPGGYSATGAIAGGVAAGAALLFAAPALAFAWWRRRKPQEFFFDVPAEEDPEVHLGQLKRFSLRELQVATDSFSNKNILGRGGFGKVYKGRLADGTLVAVKRLKEERTPGGELQFQTEVEMISMAVHRNLLRLRGFCMTPTERLLVYPYMANGSVASCLRERPPSQLPLAWSIRQQIALGSARGLSYLHDHCDPKIIHRDVKAANILLDEEFEAVVGDFGLARLMDYKDTHVTTAVRGTIGHIAPEYLSTGKSSEKTDVFGYGIMLLELITGQRAFDLARLANDDDVMLLDWVKGLLKEKKLEMLVDPDLQSNYTEAEVEQLIQVALLCTQSSPMERPKMSEVVRMLEGDGLAEKWDEWQKVEVLRQEVELSSHPTSDWILDSTDNLHAMELSGPR

SEQ ID NO: 32150 - protein, 598 aa, Arabidopsis thaliana
  misc_feature (1)..(598): Ceres Seq. ID no. 15221086
MEGDALHSLRANLVDPNNVLQSWDPTLVNPCTWFHVTCNNENSVIRVDLGNADLSGQLVPQLGQLKNLQYLELYSNNITGPVPSDLGNLTNLVSLDLYLNSFTGPIPDSLGKLFKLRFLRLNNNSLTGPIPMSLTNIMTLQVLDLSNNRLSGSVPDNGSFSLFTPISFANNLDLCGPVTSRPCPGSPPFSPPPPFIPPPIVPTPGGYSATGAIAGGVAAGAALLFAAPALAFAWWRRRKPQEFFFDVPAEEDPEVHLGQLKRFSLRELQVATDSFSNKNILGRGGFGKVYKGRLADGTLVAVKRLKEERTPGGELQFQTEVEMISMAVHRNLLRLRGFCMTPTERLLVYPYMANGSVASCLRERPPSQLPLAWSIRQQIALGSARGLSYLHDHCDPKIIHRDVKAANILLDEEFEAVVGDFGLARLMDYKDTHVTTAVRGTIGHIAPEYLSTGKSSEKTDVFGYGIMLLELITGQRAFDLARLANDDDVMLLDWVKGLLKEKKLEMLVDPDLQSNYTEAEVEQLIQVALLCTQSSPMERPKMSEVVRMLEGDGLAEKWDEWQKVEVLRQEVELSSHPTSDWILDSTDNLHAMELSGPR

SEQ ID NO: 32151 - protein, 467 aa, Arabidopsis thaliana
  misc_feature (1)..(467): Ceres Seq. ID no. 15221087
MSLTNIMTLQVLDLSNNRLSGSVPDNGSFSLFTPISFANNLDLCGPVTSRPCPGSPPFSPPPPFIPPPIVPTPGGYSATGAIAGGVAAGAALLFAAPALAFAWWRRRKPQEFFFDVPAEEDPEVHLGQLKRFSLRELQVATDSFSNKNILGRGGFGKVYKGRLADGTLVAVKRLKEERTPGGELQFQTEVEMISMAVHRNLLRLRGFCMTPTERLLVYPYMANGSVASCLRERPPSQLPLAWSIRQQIALGSARGLSYLHDHCDPKIIHRDVKAANILLDEEFEAVVGDFGLARLMDYKDTHVTTAVRGTIGHIAPEYLSTGKSSEKTDVFGYGIMLLELITGQRAFDLARLANDDDVMLLDWVKGLLKEKKLEMLVDPDLQSNYTEAEVEQLIQVALLCTQSSPMERPKMSEVVRMLEGDGLAEKWDEWQKVEVLRQEVELSSHPTSDWILDSTDNLHAMELSGPR

SEQ ID NO: 32152 - DNA, 1754 bp, Arabidopsis thaliana
  misc_feature (1)..(1754): Ceres Seq. ID no. 13592310
aattcaggtcgtatacgggtacagtcaaataacccgacccgaaatgctcaacggatctgcacggacgttcgcatcgacgattcacggctttcgcgaatcgcatcacgagccttccttctctcctacgcctctttcatcaacccttctctgcgaatccaattctgataaaagtttgtaaagaatgacaaagaaaatgagaagagtgggcaagtacgaggttggtcgcacaataggtgaaggaacctttgctaaggttaagtttgcgaggaacacagacactggtgataatgtagccatcaaaattatggctaagagtacaatacttaagaacagaatggttgatcagataaaaagagagatatctataatgaagattgttcgtcacccgaacatagtgaggttgtatgaggtgttggcgagtccttcgaaaatatatatagttttggagtttgtgacaggaggagagctctttgatagaattgttcataaagggaggcttgaagaaagtgagtctcggaaatactttcaacagcttgtagatgctgttgctcattgtcactgcaagggtgtttaccaccgtgacctaaagccagaaaatcttttactcgatacaaatggaaatctgaaggtttcggatttcggactcagtgcattgcctcaggaaggagtagaacttctgcgtaccacatgtggaactccgaactatgtagctccagaggtacttagtggacagggttacgatggttcagcagctgatatttggtcttgcggggttattcttttcgttatattggctggatatttacctttttccgagacggatcttccagggttgtacagaaaaataaatgcagcagagttttcttgtccaccgtggttttccgcagaagtgaagtttttaatacataggatacttgaccccaatcccaaaacacgtattcaaattcaaggaatcaagaaagatccttggttcagattaaattatgtgcctatacgagcaagggaagaagaagaagtgaatttggatgatattcgtgcagtttttgatggaattgagggcagttatgtagcggagaatgtagagagaaatgatgaagggcccctgatgatgaatgcctttgagatgattaccttatcacaaggcttaaatttatctgcactatttgacaggcgacaggattttgttaaaaggcaaacccgttttgtttctcgaagggaacctagtgagataattgctaacattgaggctgtagcgaactcaatgggttttaagtctcatacacgaaacttcaagacaaggctcgagggattatcttcgatcaaggccggacagttagctgttgtgatagagatttacgaggtggcaccatcgcttttcatggtagacgtaagaaaggctgctggtgaaactcttgaatatcacaagttctacaagaagctatgttcgaaactggaaaacataatatggagggcaacagaaggaataccaaagtcagagattctcagaacaatcacgttttgatcccaacttaaatccaataaaaatgtacacttgtgtaataaatgacctaattattcttcagggagattggaagatttgcttcttgagctagtattctaatttgattgtgtcttgtagtttgctttggccattggtttggatccctctgttctctgtgtatggcaatacttctcaaaacttgtcctgcgaggacatgtactaacaaaacacatccaatatgagtttgcttact

SEQ ID NO: 32153 - protein, 446 aa, Arabidopsis thaliana
  misc_feature (1)..(446): Ceres Seq. ID no. 13592311
MTKKMRRVGKYEVGRTIGEGTFAKVKFARNTDTGDNVAIKIMAKSTILKNRMVDQIKREISIMKIVRHPNIVRLYEVLASPSKIYIVLEFVTGGELFDRIVHKGRLEESESRKYFQQLVDAVAHCHCKGVYHRDLKPENLLLDTNGNLKVSDFGLSALPQEGVELLRTTCGTPNYVAPEVLSGQGYDGSAADIWSCGVILFVILAGYLPFSETDLPGLYRKINAAEFSCPPWFSAEVKFLIHRILDPNPKTRIQIQGIKKDPWFRLNYVPIRAREEEEVNLDDIRAVFDGIEGSYVAENVERNDEGPLMMNAFEMITLSQGLNLSALFDRRQDFVKRQTRFVSRREPSEIIANIEAVANSMGFKSHTRNFKTRLEGLSSIKAGQLAVVIEIYEVAPSLFMVDVRKAAGETLEYHKFYKKLCSKLENIIWRATEGIPKSEILRTITF

SEQ ID NO: 32154 - protein, 442 aa, Arabidopsis thaliana
  misc_feature (1)..(442): Ceres Seq. ID no. 13592312
MRRVGKYEVGRTIGEGTFAKVKFARNTDTGDNVAIKIMAKSTILKNRMVDQIKREISIMKIVRHPNIVRLYEVLASPSKIYIVLEFVTGGELFDRIVHKGRLEESESRKYFQQLVDAVAHCHCKGVYHRDLKPENLLLDTNGNLKVSDFGLSALPQEGVELLRTTCGTPNYVAPEVLSGQGYDGSAADIWSCGVILFVILAGYLPFSETDLPGLYRKINAAEFSCPPWFSAEVKFLIHRILDPNPKTRIQIQGIKKDPWFRLNYVPIRAREEEEVNLDDIRAVFDGIEGSYVAENVERNDEGPLMMNAFEMITLSQGLNLSALFDRRQDFVKRQTRFVSRREPSEIIANIEAVANSMGFKSHTRNFKTRLEGLSSIKAGQLAVVIEIYEVAPSLFMVDVRKAAGETLEYHKFYKKLCSKLENIIWRATEGIPKSEILRTITF

SEQ ID NO: 32155 - protein, 405 aa, Arabidopsis thaliana
  misc_feature (1)..(405): Ceres Seq. ID no. 13592313
MAKSTILKNRMVDQIKREISIMKIVRHPNIVRLYEVLASPSKIYIVLEFVTGGELFDRIVHKGRLEESESRKYFQQLVDAVAHCHCKGVYHRDLKPENLLLDTNGNLKVSDFGLSALPQEGVELLRTTCGTPNYVAPEVLSGQGYDGSAADIWSCGVILFVILAGYLPFSETDLPGLYRKINAAEFSCPPWFSAEVKFLIHRILDPNPKTRIQIQGIKKDPWFRLNYVPIRAREEEEVNLDDIRAVFDGIEGSYVAENVERNDEGPLMMNAFEMITLSQGLNLSALFDRRQDFVKRQTRFVSRREPSEIIANIEAVANSMGFKSHTRNFKTRLEGLSSIKAGQLAVVIEIYEVAPSLFMVDVRKAAGETLEYHKFYKKLCSKLENIIWRATEGIPKSEILRTITF

SEQ ID NO: 32156 - DNA, 855 bp, Arabidopsis thaliana
  misc_feature (1)..(855): Ceres Seq. ID no. 13592318
acatttcctcactcaactctctcattctcactaacagagagaaaaagcaaaagcaaaaatggctcgatctttcgctattgctgtgatctgtatcgtcctcatcgccggcgttactggtcaagctccgacttcaccaccaaccgctacaccagctccaccaactccaacaactcctccaccagcagcaactcctcctcctgtctcagcaccaccaccagtcacaacatctcctcctccagtcaccactgctcctcctccagcaaatccaccaccaccagtctcttctcctcctcctgcttctcctccaccagctactcctcctccagtcgcttctcctcctcctcccgttgcttctcctccaccagcaactcctcctcccgtcgctactcctcccccagctcctctagcttcccctcctgctcaagttccagctccagcaccgaccacgaagccagattctccatctccatctccgtcatctagcccacctcttccatcaagcgacgctcctggacctagcaccgattctatctctcctgctcctagccccactgatgtgaacgaccagaatggagctagcaagatggtttcgagcttagtatttggatctgttctcgtctgatttatgatctaagtggaatcttttgtgactgtgttacttgcatttatttttatgtcgtctttgtttgttccactgtattgcttgggactgaattcttttgggatttattatctttcggagaggatactattgagagcttgagatggagatagcaggatattttgattgcagatacttttgtggcttcatttctcattccatttgattattagtgtactacattccttttctcc

SEQ ID NO: 32157 - protein, 187 aa, Arabidopsis thaliana
  misc_feature (1)..(187): Ceres Seq. ID no. 13592319
MARSFAIAVICIVLIAGVTGQAPTSPPTATPAPPTPTTPPPAATPPPVSAPPPVTTSPPPVTTAPPPANPPPPVSSPPPASPPPATPPPVASPPPPVASPPPATPPPVATPPPAPLASPPAQVPAPAPTTKPDSPSPSPSSSPPLPSSDAPGPSTDSISPAPSPTDVNDQNGASKMVSSLVFGSVLV

SEQ ID NO: 32158 - protein, 160 aa, Arabidopsis thaliana
  misc_feature (1)..(160): Ceres Seq. ID no. 13592320
TFPHSTLSFSLTERKSKSKNGSIFRYCCDLYRPHRRRYWSSSDFTTNRYTSSTNSNNSSTSSNSSSCLSTTTSHNISSSSHHCSSSSKSTTTSLFSSSCFSSTSYSSSSRFSSSSRCFSSTSNSSSRRYSSPSSSSFPSCSSSSSSTDHEARFSISISVI

SEQ ID NO: 32159 - DNA, 1710 bp, Arabidopsis thaliana
  misc_feature (1)..(1710): Ceres Seq. ID no. 13592321
gtctctctcacacactaacagaaagcacaaaaaacagagacaaaagaatggcgcgaaaatccctaattttcccggtgattttgctcgccgttcttctcttctctccgccgatttactccgccggtcacgattaccgcgacgctctccgtaaaagcattctcttcttcgaaggtcaacgttccggtaaactccctccagatcaacgcttaaaatggcgccgtgactcagcattacgcgacggttcctccgccggcgttgacttatccggtggttactacgacgccggagacaacatcaagttcggttttccgatggcgttcacaacaacgatgctttcatggagtataatcgatttcggtaaaaccatgggacctgagcttagaaacgccgtgaaagctgttaaatggggaacagattacctccttaaagcgacggcgattcccggagtagtcttcgtccaagtcggagacgcttactccgatcataactgttgggaaaggcctgaagatatggacactctccgtactgtttacaaaatcgatagagctcatcctggttctgacgtcgctggtgaaaccgcagccgctttagccgccgcttcaatcgtttttagaaaacgcgatcctgcttattccagacttctacttgaccgtgccactagggtattcgcgtttgctaacagatatcgcggcgcgtatagtaacagtctctaccacgcggtttgtcctttttactgtgatttcaacggttaccaggatgagttactgtggggagcggcatggctacacaaagcctcgaggaaacgagcgtacagagaattcattgtgaagaacgaggtcattcttaaggctggagataccattaatgagtttggttgggacaataagcatgctgggattaatgtcttaatctccaaggaagtgttaatgggaaaagcagagtattttgagtctttcaagcagaacgcagatgggtttatctgttctatattgcctggaatttctcacccccaagtccaatactctcgaggagggctactagtgaagactggagggagtaacatgcaacatgtaacatcactatctttcctcctattggcttactctaattatctgagccatgccaaaaaggttgtgccttgtggcgaattaactgcttccccatctctcctccgtcaaatcgccaagcgtcaggtggattacattctcggagacaacccgatgggactgtcttacatggttggatacggtcaaaagtttccacgtaggattcatcaccgtggtagctcggttccttcggtttcagcccatccaagccacatagggtgcaaagaaggctctcgctatttcctaagcccaaatcctaacccaaaccttttggttggtgctgtagtcggtggacctaatgtcactgatgcttttccggattcaagaccttactttcagcagtctgagcccacgacttatatcaatgcaccactagtgggccttctcggttacttctccgcccattctacttggcgatgagggagggccttattacttattactctctatcctattagaggtgtgctggaaactttaggccaccctaaaacccttttttttcttttttaatgttattgccactctttattttctactacttaaccaattgtattgtaagcccgtaattagtgaagaagagaaagagttatgtcggtgtctaaac

SEQ ID NO: 32160 - protein, 507 aa, Arabidopsis thaliana
  misc_feature (1)..(507): Ceres Seq. ID no. 13592322
LSHTLTESTKNRDKRMARKSLIFPVILLAVLLFSPPIYSAGHDYRDALRKSILFFEGQRSGKLPPDQRLKWRRDSALRDGSSAGVDLSGGYYDAGDNIKFGFPMAFTTTMLSWSIIDFGKTMGPELRNAVKAVKWGTDYLLKATAIPGVVFVQVGDAYSDHNCWERPEDMDTLRTVYKIDRAHPGSDVAGETAAALAAASIVFRKRDPAYSRLLLDRATRVFAFANRYRGAYSNSLYHAVCPFYCDFNGYQDELLWGAAWLHKASRKRAYREFIVKNEVILKAGDTINEFGWDNKHAGINVLISKEVLMGKAEYFESFKQNADGFICSILPGISHPQVQYSRGGLLVKTGGSNMQHVTSLSFLLLAYSNYLSHAKKVVPCGELTASPSLLRQIAKRQVDYILGDNPMGLSYMVGYGQKFPRRIHHRGSSVPSVSAHPSHIGCKEGSRYFLSPNPNPNLLVGAVVGGPNVTDAFPDSRPYFQQSEPTTYINAPLVGLLGYFSAHSTWR

SEQ ID NO: 32161 - protein, 492 aa, Arabidopsis thaliana
  misc_feature (1)..(492): Ceres Seq. ID no. 13592323
MARKSLIFPVILLAVLLFSPPIYSAGHDYRDALRKSILFFEGQRSGKLPPDQRLKWRRDSALRDGSSAGVDLSGGYYDAGDNIKFGFPMAFTTTMLSWSIIDFGKTMGPELRNAVKAVKWGTDYLLKATAIPGVVFVQVGDAYSDHNCWERPEDMDTLRTVYKIDRAHPGSDVAGETAAALAAASIVFRKRDPAYSRLLLDRATRVFAFANRYRGAYSNSLYHAVCPFYCDFNGYQDELLWGAAWLHKASRKRAYREFIVKNEVILKAGDTINEFGWDNKHAGINVLISKEVLMGKAEYFESFKQNADGFICSILPGISHPQVQYSRGGLLVKTGGSNMQHVTSLSFLLLAYSNYLSHAKKVVPCGELTASPSLLRQIAKRQVDYILGDNPMGLSYMVGYGQKFPRRIHHRGSSVPSVSAHPSHIGCKEGSRYFLSPNPNPNLLVGAVVGGPNVTDAFPDSRPYFQQSEPTTYINAPLVGLLGYFSAHSTWR

SEQ ID NO: 32162 - protein, 404 aa, Arabidopsis thaliana
  misc_feature (1)..(404): Ceres Seq. ID no. 13592324
MAFTTTMLSWSIIDFGKTMGPELRNAVKAVKWGTDYLLKATAIPGVVFVQVGDAYSDHNCWERPEDMDTLRTVYKIDRAHPGSDVAGETAAALAAASIVFRKRDPAYSRLLLDRATRVFAFANRYRGAYSNSLYHAVCPFYCDFNGYQDELLWGAAWLHKASRKRAYREFIVKNEVILKAGDTINEFGWDNKHAGINVLISKEVLMGKAEYFESFKQNADGFICSILPGISHPQVQYSRGGLLVKTGGSNMQHVTSLSFLLLAYSNYLSHAKKVVPCGELTASPSLLRQIAKRQVDYILGDNPMGLSYMVGYGQKFPRRIHHRGSSVPSVSAHPSHIGCKEGSRYFLSPNPNPNLLVGAVVGGPNVTDAFPDSRPYFQQSEPTTYINAPLVGLLGYFSAHSTWR

SEQ ID NO: 32163 - DNA, 1176 bp, Arabidopsis thaliana
  misc_feature (1)..(1176): Ceres Seq. ID no. 13592325
gaccatttcttttccatgactttcctcttatcaagaacatttatttctctcactctcagaccttcttgttcgatttccatggcgaatttaacgacgaacgctaaatctcgcctgagaggtgttgtattcgatatggacggaaccctgactgttccggtcatcgatttcgccgcaatgtatagagctgttcttggtgaagatgcttacaagcgaatcaaagcagagagccctagtgggattgatattctgcatcatattgagtcgtggagtcctgataaacagcagaaggcgtatgaaatcattgctgattatgagaaacaaggaatagataagcttcaaatcatgcctggtactgctgaactatgtggcttccttgattccaaaaagataaagagggggctaattacacgcaatgttcaaaaggcaatcgacatcttccatcaacgttttgaggttatcttttctccagcactaggcagagagtttcgtccatataaaccaaacccagacccgctgttgcatatatgttctacatgggacatccaacctaatgaagtcatgatggttggtgacagcttaaaagatgatgtgagtgacagacatgatgacaagcctttggtcaaccctttctccatagcaaatcgataagcaatgcaatgaaagaagcttaaacaatggatcttctcatgccattgcttaaagattttctatgtggaaaggatgcctaccaacttttcagactatttttctcacatctttactgaagattacaactgggaatcgatctttcttttctcgattctgcagatagcatgtgggaaacgagctggagccttcacttgcttgctagatgaaaccggaaggtatggaccagacgatttttctgtttccggtctgcaacctgattttaaggttgattccttgtccaaaatccagaacctattggagacgaacttcgacctgaacccgtagtttttccaagttcctcatcttgtagtttcagtgaccaaattagtgtcctactcaacacagtatctgttcaggatagccataaatgtcaaaccacggaattctatgcactggctatctttaagttgcacaattgtgtccctgcatggtcgtctagcgaacatgtgtgtgagggcaaacattgttgtttgttaaatccaaaatttc

SEQ ID NO: 32164 - protein, 215 aa, Arabidopsis thaliana
  misc_feature (1)..(215): Ceres Seq. ID no. 13592326
DHFFSMTFLLSRTFISLTLRPSCSISMANLTTNAKSRLRGVVFDMDGTLTVPVIDFAAMYRAVLGEDAYKRIKAESPSGIDILHHIESWSPDKQQKAYEIIADYEKQGIDKLQIMPGTAELCGFLDSKKIKRGLITRNVQKAIDIFHQRFEVIFSPALGREFRPYKPNPDPLLHICSTWDIQPNEVMMVGDSLKDDVSDRHDDKPLVNPFSIANR

SEQ ID NO: 32165 - protein, 210 aa, Arabidopsis thaliana
  misc_feature (1)..(210): Ceres Seq. ID no. 13592327
MTFLLSRTFISLTLRPSCSISMANLTTNAKSRLRGVVFDMDGTLTVPVIDFAAMYRAVLGEDAYKRIKAESPSGIDILHHIESWSPDKQQKAYEIIADYEKQGIDKLQIMPGTAELCGFLDSKKIKRGLITRNVQKAIDIFHQRFEVIFSPALGREFRPYKPNPDPLLHICSTWDIQPNEVMMVGDSLKDDVSDRHDDKPLVNPFSIANR

SEQ ID NO: 32166 - protein, 189 aa, Arabidopsis thaliana
  misc_feature (1)..(189): Ceres Seq. ID no. 13592328
MANLTTNAKSRLRGVVFDMDGTLTVPVIDFAAMYRAVLGEDAYKRIKAESPSGIDILHHIESWSPDKQQKAYEIIADYEKQGIDKLQIMPGTAELCGFLDSKKIKRGLITRNVQKAIDIFHQRFEVIFSPALGREFRPYKPNPDPLLHICSTWDIQPNEVMMVGDSLKDDVSDRHDDKPLVNPFSIANR

SEQ ID NO: 32167 - DNA, 1328 bp, Arabidopsis thaliana
  misc_feature (1)..(1328): Ceres Seq. ID no. 13592347
ggaagagcacataatgatgaccaaaaattctatcgaattcgatccttacatcgagcgtaaagctttcgacgaaacaaaacaaggtgtgaaaggcctcgtcgacgctaaaatcactgaagttcctcgtatcttccaccaccgtcaagatatcttaaccaacaagaaaccttctgcttcagtatcagacctagagatccctatcatcgactttgcaagcgtccacgcggacacagcctcacgtgaagccatcgtagagaaagtcaaatatgcggtggagaattggggattcttccaggttatcaatcatagtattcctttaaacgttcttgaagagattaaagatggggttcgtaggtttcacgaggaagatcctgaggtcaagaaatcattcttctcgcgtgatgccggcaacaaaaaatttgtatacaacagtaacttcgatctatacagttcttcgccgtctgttaattggagagattctttctcttgttacatagctccagatcctccagctcctgaggagatccctgagacttgcagggatgctatgtttgaatactcaaagcatgtgttgagtttcggtggtttactatttgagcttctctcagaagcacttggtttgaaatctcagacccttgagagcatggattgcgtgaagactttgcttatgatctgccattattacccaccttgtccacaacctgacctaacgttagggataacgaaacactcagataactccttcctcacgcttcttctccaagacaacattggtggtcttcaaattcttcatcaagactcttgggttgatgtctctcctatccatggagctcttgtcgtcaacattggagattttttgcagctgataacgaacgataagtttgtaagtgtggagcatagagtgcttgcaaatagacaaggaccaaggatttcagtagctagctttttcagctcaagtatgcgtccaaattccagagtttacggaccgatgaaagagcttgtgtctgaagaaaaccctccaaaatacagagacataaccataaaagagtattcaaaaatattttttgagaaaggtctcgatggaacgtcgcatctctcgaatatcaggatatgaaaaacgaaaacgacagaaatttcttaatgagtttctttgcatcaattatactgtttgtttatgtctcttcaataatcaaaccaatgcatgtaccaaatataagaaataattgtgtgtgtcgttgtgtgtaaactatgtatatctgtatattcgttgagctactgtgtatttaaatcttatcacttgtaaaatgttatcaagtgatattgaccgc

SEQ ID NO: 32168 - protein, 370 aa, Arabidopsis thaliana
  misc_feature (1)..(370): Ceres Seq. ID no. 13592348
EEHIMMTKNSIEFDPYIERKAFDETKQGVKGLVDAKITEVPRIFHHRQDILTNKKPSASVSDLEIPIIDFASVHADTASREAIVEKVKYAVENWGFFQVINHSIPLNVLEEIKDGVRRFHEEDPEVKKSFFSRDAGNKKFVYNSNFDLYSSSPSVNWRDSFSCYIAPDPPAPEEIPETCRDAMFEYSKHVLSFGGLLFELLSEALGLKSQTLESMDCVKTLLMICHYYPPCPQPDLTLGITKHSDNSFLTLLLQDNIGGLQILHQDSWVDVSPIHGALVVNIGDFLQLITNDKFVSVEHRVLANRQGPRISVASFFSSSMRPNSRVYGPMKELVSEENPPKYRDITIKEYSKIFFEKGLDGTSHLSNIRI

SEQ ID NO: 32169 - protein, 366 aa, Arabidopsis thaliana
  misc_feature (1)..(366): Ceres Seq. ID no. 13592349
MMTKNSIEFDPYIERKAFDETKQGVKGLVDAKITEVPRIFHHRQDILTNKKPSASVSDLEIPIIDFASVHADTASREAIVEKVKYAVENWGFFQVINHSIPLNVLEEIKDGVRRFHEEDPEVKKSFFSRDAGNKKFVYNSNFDLYSSSPSVNWRDSFSCYIAPDPPAPEEIPETCRDAMFEYSKHVLSFGGLLFELLSEALGLKSQTLESMDCVKTLLMICHYYPPCPQPDLTLGITKHSDNSFLTLLLQDNIGGLQILHQDSWVDVSPIHGALVVNIGDFLQLITNDKFVSVEHRVLANRQGPRISVASFFSSSMRPNSRVYGPMKELVSEENPPKYRDITIKEYSKIFFEKGLDGTSHLSNIRI

SEQ ID NO: 32170 - protein, 365 aa, Arabidopsis thaliana
  misc_feature (1)..(365): Ceres Seq. ID no. 13592350
MTKNSIEFDPYIERKAFDETKQGVKGLVDAKITEVPRIFHHRQDILTNKKPSASVSDLEIPIIDFASVHADTASREAIVEKVKYAVENWGFFQVINHSIPLNVLEEIKDGVRRFHEEDPEVKKSFFSRDAGNKKFVYNSNFDLYSSSPSVNWRDSFSCYIAPDPPAPEEIPETCRDAMFEYSKHVLSFGGLLFELLSEALGLKSQTLESMDCVKTLLMICHYYPPCPQPDLTLGITKHSDNSFLTLLLQDNIGGLQILHQDSWVDVSPIHGALVVNIGDFLQLITNDKFVSVEHRVLANRQGPRISVASFFSSSMRPNSRVYGPMKELVSEENPPKYRDITIKEYSKIFFEKGLDGTSHLSNIRI

SEQ ID NO: 32171 - DNA, 1316 bp, Arabidopsis thaliana
  misc_feature (1)..(1316): Ceres Seq. ID no. 13592351
gagcttaagccaaagatctctcattgacctttgcttcttcatcttcttctccgatcacagtttctctctttctggattccaccattcttctctttgtcgtctatgtgacctattctcgattcgatccatggaataatctctgtccgaagaagatctctcattccccttcaaaagcagacagattcgaaactttcccccaaattcgtggaaatcttgtgttagggtttgggttattctcaaatagaatcaatcagatcgttttttctttttgttagaagaagatgaagatagcggccaatggccggtttttcacaatcggactcgtagcgtcatggtattcatcgaacatcggagttttattgctgaacaagtacttgttaagcaactatggattcaagtatccgatcttcctcaccatgtgtcacatgacggcttgttctcttctcagctacgttgctattgcttggatgaagatggttccgatgcaaacgatccgatctcgagttcagtttcttaagatcgctgcgttaagtctcgttttctgtgtgtcggtggtttttgggaatatctctcttcggtttcttcctgtatcgtttaatcaagcgattggtgctacgacgccgtttttcaccgccgtgtttgcttatctgattacttttaagagagaagcttggttgacttacttcactctcgtccctgttgttaccggtgttgtcattgccagtgggaaacatccttgggatttgcctgagcttgatcacttcatgatatgtagtttatatgctgctcaaattagactagaagttgttcttttatgcgtgcatagtgtgaatcctagtgagccaagtttccacctgtttggattcattatgtgcattgcagctacagctgcaagagcacttaaatcagttcttcaaggaattttgctttcttcagaaggggagaagctaaattccatgaacctcctcctttacatggctcccatagctgttgtgttcctccttcctgctacacttatcatggaaaaaaatgttgttggcattacaattgcacttgccagagacgattttagaatcgtttggtatctgctattcaattcggcgctagcttattttgtgaacttgaccaatttcttagtcacgaaacacaccagcgctctgactctccaggtgctaggaaacgccaaaggtgcagtagcagtggtggtatcaatcctgatattcaggaatcctgtctcagtgactggaatgttaggttactcgctcactgtctgtggagttatcctctacagcgaagccaagaaacgaagcaaataa

SEQ ID NO: 32172 - protein, 344 aa, Arabidopsis thaliana
  misc_feature (1)..(344): Ceres Seq. ID no. 13592352
MKIAANGRFFTIGLVASWYSSNIGVLLLNKYLLSNYGFKYPIFLTMCHMTACSLLSYVAIAWMKMVPMQTIRSRVQFLKIAALSLVFCVSVVFGNISLRFLPVSFNQAIGATTPFFTAVFAYLITFKREAWLTYFTLVPVVTGVVIASGKHPWDLPELDHFMICSLYAAQIRLEVVLLCVHSVNPSEPSFHLFGFIMCIAATAARALKSVLQGILLSSEGEKLNSMNLLLYMAPIAVVFLLPATLIMEKNVVGITIALARDDFRIVWYLLFNSALAYFVNLTNFLVTKHTSALTLQVLGNAKGAVAVVVSILIFRNPVSVTGMLGYSLTVCGVILYSEAKKRSK

SEQ ID NO: 32173 - protein, 299 aa, Arabidopsis thaliana
  misc_feature (1)..(299): Ceres Seq. ID no. 13592353
MCHMTACSLLSYVAIAWMKMVPMQTIRSRVQFLKIAALSLVFCVSVVFGNISLRFLPVSFNQAIGATTPFFTAVFAYLITFKREAWLTYFTLVPVVTGVVIASGKHPWDLPELDHFMICSLYAAQIRLEVVLLCVHSVNPSEPSFHLFGFIMCIAATAARALKSVLQGILLSSEGEKLNSMNLLLYMAPIAVVFLLPATLIMEKNVVGITIALARDDFRIVWYLLFNSALAYFVNLTNFLVTKHTSALTLQVLGNAKGAVAVVVSILIFRNPVSVTGMLGYSLTVCGVILYSEAKKRSK

SEQ ID NO: 32174 - protein, 296 aa, Arabidopsis thaliana
  misc_feature (1)..(296): Ceres Seq. ID no. 13592354
MTACSLLSYVAIAWMKMVPMQTIRSRVQFLKIAALSLVFCVSVVFGNISLRFLPVSFNQAIGATTPFFTAVFAYLITFKREAWLTYFTLVPVVTGVVIASGKHPWDLPELDHFMICSLYAAQIRLEVVLLCVHSVNPSEPSFHLFGFIMCIAATAARALKSVLQGILLSSEGEKLNSMNLLLYMAPIAVVFLLPATLIMEKNVVGITIALARDDFRIVWYLLFNSALAYFVNLTNFLVTKHTSALTLQVLGNAKGAVAVVVSILIFRNPVSVTGMLGYSLTVCGVILYSEAKKRSK

SEQ ID NO: 32175 - DNA, 1415 bp, Arabidopsis thaliana
  misc_feature (1)..(1415): Ceres Seq. ID no. 13592359
gaagcttcgttctcaatccccaattcgaaatcctagctgaagtctatgctccataatcaaatccagttcatcagagatcaaagatggctattgcacgaactggagtttatgttgatgattaccttgagtatgcaagcactttccctgcagagctacaaagattactaaacacagttcgcgaactagacgagagatctcaatcgcttataaatcagacaagacagcaaactaagtattgcttagggcttgcttcacagagttctaaaaagggtaatggtaatcattacaataatggtggtcttgatgaagaggaaacgattgagaaaatgcgtaaagagattgagtctagtcaggaaaatgcgttaagtttgtgtaccgagaaggttttattggcccgacaagcgtatgatcttatagatagtcatgtaaaacgacttgatgaagatctgaataattttgcagaagatttaaagcaagagggaaaaattccaccagacgagccctctgttcttcctccactacctatagttcctaaagcggaaaagcgtaagtccttctatggcacacctcagcccaagaagattgattatagagatagagactgggatcgtgacagggattttgagctcatgcctcctccaggaagcaatcggaaagaccttatgccaattgaagagcagccaatcgatccaaacgaaccaacttactgtgtctgccatcaggtgtcctttggagacatgattgcctgtgacaatgagaatgtgagcctgctctcccagcatcttattatttattttttaatgtatagctgttatgatgaaaccttttgttcctgtttcgacagtgccaaggaggtgaatggtttcactatacatgcgttggcctcacacctgagaccagattcaaagggaaatggtactgccccacctgcagactcctcccacagtcacactaatatcatttgtacctgtgagaaggtattgctttactatcatcagaactaagctctcctcctgcaatttccatgcattctgtagctaatataatacgtatggagatttgcacgtacttatgatattaattctcataggtgccactggcatcttctttggcaccttcccttcatgaccaatgccaccaaactcatctttcttgttacccaacatctagcaagtgcaagtagaagcaaactttagatggagaaatcatcatgttttgtaaacctcgggttaattcgtggagcatatattttgtatatcaattgtatttgggtattggtgggcattttccgttttattctactagtatcgatatttacatctgcttctttctttcttttttcccctcaaaccatgagcctttgtattgatcaaatgacatgtacaaaggttttgttcatcagaaggaatttcact

SEQ ID NO: 32176 - protein, 306 aa, Arabidopsis thaliana
  misc_feature (1)..(306): Ceres Seq. ID no. 13592360
MAIARTGVYVDDYLEYASTFPAELQRLLNTVRELDERSQSLINQTRQQTKYCLGLASQSSKKGNGNHYNNGGLDEEETIEKMRKEIESSQENALSLCTEKVLLARQAYDLIDSHVKRLDEDLNNFAEDLKQEGKIPPDEPSVLPPLPIVPKAEKRKSFYGTPQPKKIDYRDRDWDRDRDFELMPPPGSNRKDLMPIEEQPIDPNEPTYCVCHQVSFGDMIACDNENVSLLSQHLIIYFLMYSCYDETFCSCFDSAKEVNGFTIHALASHLRPDSKGNGTAPPADSSHSHTNIICTCEKVLLYYHQN

SEQ ID NO: 32177 - protein, 225 aa, Arabidopsis thaliana
  misc_feature (1)..(225): Ceres Seq. ID no. 13592361
MRKEIESSQENALSLCTEKVLLARQAYDLIDSHVKRLDEDLNNFAEDLKQEGKIPPDEPSVLPPLPIVPKAEKRKSFYGTPQPKKIDYRDRDWDRDRDFELMPPPGSNRKDLMPIEEQPIDPNEPTYCVCHQVSFGDMIACDNENVSLLSQHLIIYFLMYSCYDETFCSCFDSAKEVNGFTIHALASHLRPDSKGNGTAPPADSSHSHTNIICTCEKVLLYYHQN

SEQ ID NO: 32178 - DNA, 1542 bp, Arabidopsis thaliana
  misc_feature (1)..(1542): Ceres Seq. ID no. 13592362
gaaaagaagcaatcaacaagaaaatggacctcacccaaatcctactcctctcctttctctttctcactatctccatcaaactcttgctcacaaaatctaaccggaaacctaatcttcctccttctccggcttaccctttaccggttatcggccacctccacctcctcaagcaaccggtccaccgaacattccactccatctctaagtcccttggaaatgctccaatcttccacctccgcctgggaaaccgcctcgtttacgtcatctcctcacactccatagccgaagaatgtttcaccaaaaacgacgtcgttcttgcgaaccgtcctgatatcatcatggccaaacacgtcggctataactttaccaatatgattgcagcatcttacggcgaccactggaggaatctccgccgcatcgccgccgtcgagatattttcttctcatagaatcagtaccttttcttctatccgtaaagacgagatccgacggctcataacacatctctctagagactccttgcacggatttgttgaagtggagttgaaatcgttattaaccaacttggcattcaacaacatcatcatgatggtagccggaaaacgatattacggtaccggtacagaagacaatgatgaagccaagctcgtgagggaacttatagcggagataatggccggcgccggttctggaaatttggctgattatcttccgtccataaattgggtcacaaactttgagaaccagaccaaaatcttggggaatcgactcgatagagtcctgcaaaaactggttgatgagaaacgtgcagagaaagaaaagggtcaaactttgatcgatcatttgctttctttccaagaaaccgaacccgagtactatactgatgtcatcatcaaaggaatcatactggctttggttcttgcggggacagatacatcttcagtgacgttggaatgggcaatgtcaaatttgctgaaccatccagagatacttgagaaagcgagagcggagatcgatgataaaatcggttcagaccggttagttgaagaatcagatattgtaaatctccattatctccaaaacattgtgtcagaaacattacgtttgtatcctgcggttccactactactccctcatttctcatcggatgaatgtaaagtggcgggctacgatatgccacgtcgcacgttgttattaacaaacgtatgggcgatgcatagagatccaggtttatgggaagagccagagaggttcaagccggagaggttcgagaaagaaggagaggctcgaaagctaatgccgtttgggatgggacgacgagcttgtcctggagctgagcttgggaagcggttagtgagccttgctcttgggtgcttgattcagtctttcgagtgggagagagttggtgcagaacttgtggacatgactgaaggcgaagggatcactatgcctaaagctactccgttgcgagctatgtgcaaggcacgtgccattgttggtaaaacgatataattgacgtatgtaggatctattgtgtagaaac

SEQ ID NO: 32179 - protein, 502 aa, Arabidopsis thaliana
  misc_feature (1)..(502): Ceres Seq. ID no. 13592363
KEAINKKMDLTQILLLSFLFLTISIKLLLTKSNRKPNLPPSPAYPLPVIGHLHLLKQPVHRTFHSISKSLGNAPIFHLRLGNRLVYVISSHSIAEECFTKNDVVLANRPDIIMAKHVGYNFTNMIAASYGDHWRNLRRIAAVEIFSSHRISTFSSIRKDEIRRLITHLSRDSLHGFVEVELKSLLTNLAFNNIIMMVAGKRYYGTGTEDNDEAKLVRELIAEIMAGAGSGNLADYLPSINWVTNFENQTKILGNRLDRVLQKLVDEKRAEKEKGQTLIDHLLSFQETEPEYYTDVIIKGIILALVLAGTDTSSVTLEWAMSNLLNHPEILEKARAEIDDKIGSDRLVEESDIVNLHYLQNIVSETLRLYPAVPLLLPHFSSDECKVAGYDMPRRTLLLTNVWAMHRDPGLWEEPERFKPERFEKEGEARKLMPFGMGRRACPGAELGKRLVSLALGCLIQSFEWERVGAELVDMTEGEGITMPKATPLRAMCKARAIVGKTI

SEQ ID NO: 32180 - protein, 495 aa, Arabidopsis thaliana
  misc_feature (1)..(495): Ceres Seq. ID no. 13592364
MDLTQILLLSFLFLTISIKLLLTKSNRKPNLPPSPAYPLPVIGHLHLLKQPVHRTFHSISKSLGNAPIFHLRLGNRLVYVISSHSIAEECFTKNDVVLANRPDIIMAKHVGYNFTNMIAASYGDHWRNLRRIAAVEIFSSHRISTFSSIRKDEIRRLITHLSRDSLHGFVEVELKSLLTNLAFNNIIMMVAGKRYYGTGTEDNDEAKLVRELIAEIMAGAGSGNLADYLPSINWVTNFENQTKILGNRLDRVLQKLVDEKRAEKEKGQTLIDHLLSFQETEPEYYTDVIIKGIILALVLAGTDTSSVTLEWAMSNLLNHPEILEKARAEIDDKIGSDRLVEESDIVNLHYLQNIVSETLRLYPAVPLLLPHFSSDECKVAGYDMPRRTLLLTNVWAMHRDPGLWEEPERFKPERFEKEGEARKLMPFGMGRRACPGAELGKRLVSLALGCLIQSFEWERVGAELVDMTEGEGITMPKATPLRAMCKARAIVGKTI

SEQ ID NO: 32181 - protein, 390 aa, Arabidopsis thaliana
  misc_feature (1)..(390): Ceres Seq. ID no. 13592365
MAKHVGYNFTNMIAASYGDHWRNLRRIAAVEIFSSHRISTFSSIRKDEIRRLITHLSRDSLHGFVEVELKSLLTNLAFNNIIMMVAGKRYYGTGTEDNDEAKLVRELIAEIMAGAGSGNLADYLPSINWVTNFENQTKILGNRLDRVLQKLVDEKRAEKEKGQTLIDHLLSFQETEPEYYTDVIIKGIILALVLAGTDTSSVTLEWAMSNLLNHPEILEKARAEIDDKIGSDRLVEESDIVNLHYLQNIVSETLRLYPAVPLLLPHFSSDECKVAGYDMPRRTLLLTNVWAMHRDPGLWEEPERFKPERFEKEGEARKLMPFGMGRRACPGAELGKRLVSLALGCLIQSFEWERVGAELVDMTEGEGITMPKATPLRAMCKARAIVGKTI

SEQ ID NO: 32182 - DNA, 2050 bp, Arabidopsis thaliana
  misc_feature (1)..(2050): Ceres Seq. ID no. 13592370
tctcttccttctcatctctcttttcctctctttctttctctctctcagccctaagagagaagaaataggctctgctctgcgccttttctacaagaaattcaccaaaaaagcttgaatatttatcggaatcaaagcttgggtttttaatcctggtaaagccatgtcacatatggtgtttcagagcgttgtcgctcccaaacccttatctcctctcaaaccctgtttacctatccctcgtccactcgttactctgccttgtaagctccgtcgtggcttcgttagagcttcttcgtcctcgtttcttgtcgatgattcagtttcaggactcgagcgttgcttacagttaccttctggagttgagttaggcacatcttcctctggctctttctctgcaagtactcagatgtgtcctgtgatgaaaggcaaatttggttcggtaggagctgttactttggaaaaagggaagcttgatatgacccagaagatttctgagactagccctgagattgcaactggaggagggggtggaaacattggaaagagtatcaataatggtggtggcgatggaggtgacgataatggtgatgatgatgattactttgatgaattcgatgatggtgatgagggagatgatgatggactttttaggcgtaggatgtttctcgcagagatttttgataggaaattcgttgatgctgtgttgaatgaatggcaaaaaacaatgatggatttacctgccggtctccgtcaagcatatgaaatgggtttggtcagctcagctcaaatggtgaaattccttgccataaatgcccgtcctacaacgactagaatgatctcccgtgcccttcctcagggattatcgagggcctttgttggcaggatgttggcggatcctgcatttctctataaacttcttttggagcaagctgccacggttggatgctcagtttggtgggaggtgaagaatcgtaagaatagactaaaagaggaatgggatcttgcacttataaatgttcttactgtatcagcatgcaatgcagctgctgtttggttactagctccatgtcgttcctatggaaacacattccggtttgacctgcaaaatacattacaaaagctaccaaataatttatttgaaatgagctatcctcttagagagttcgacttgcaaaagagatttcattctcttttctacaaggctgcagagttgtccattcttggactcgcagcaggaacactccagggttcgttgtcaaacgttctagcaggaaagaagaagaacagagtatctgtgacggtcccatctatcagcacaaatgctcttggttatggtgcatttcttggaatatatgccaacttgagatatcagctgttatgtggatttgaaagaggagtgagcagtcactttgacgtcataggagtagcactcttcttcggcactgccttgaggattatgaatgtgcaattaggggaaaagtcaagacaagtatggctaggtgtagaggcagacccactggcgcagtcagatgatctgctggcaaaagcatacaaccgaccctcagaggaagcagtagcaaagccatcttcaaaatggttcatctcaaagaatgcaattgtctcagggctactcgggaagaagcaagaagattcagtttcagattctccacctccaaaggctcggcgaaaaaggatagtgaggaagaaggtggctgcatctgcctcttaaataaccaacaaaacctctaaaatgtcacaattttcagagtccatggaagaacaacagtgaggttttgttgttcatttgaggcacacatgaaaaaggttttgttgccagaggaaggaagaagggatcaccaaacttggaggaattgaaaaaaagctctatagcttctttttttttttttttactttatgactcgttctctctagttttaagtgcttttggaaagacatttctatttttaggtgtggtgataaagatgcttatctctggttaaaattctgtattttctcaatgtttctaataaatagccacatcttatacgttcgt

SEQ ID NO: 32183 - protein, 521 aa, Arabidopsis thaliana
  misc_feature (1)..(521): Ceres Seq. ID no. 13592371
MSHMVFQSVVAPKPLSPLKPCLPIPRPLVTLPCKLRRGFVRASSSSFLVDDSVSGLERCLQLPSGVELGTSSSGSFSASTQMCPVMKGKFGSVGAVTLEKGKLDMTQKISETSPEIATGGGGGNIGKSINNGGGDGGDDNGDDDDYFDEFDDGDEGDDDGLFRRRMFLAEIFDRKFVDAVLNEWQKTMMDLPAGLRQAYEMGLVSSAQMVKFLAINARPTTTRMISRALPQGLSRAFVGRMLADPAFLYKLLLEQAATVGCSVWWEVKNRKNRLKEEWDLALINVLTVSACNAAAVWLLAPCRSYGNTFRFDLQNTLQKLPNNLFEMSYPLREFDLQKRFHSLFYKAAELSILGLAAGTLQGSLSNVLAGKKKNRVSVTVPSISTNALGYGAFLGIYANLRYQLLCGFERGVSSHFDVIGVALFFGTALRIMNVQLGEKSRQVWLGVEADPLAQSDDLLAKAYNRPSEEAVAKPSSKWFISKNAIVSGLLGKKQEDSVSDSPPPKARRKRIVRKKVAASAS

SEQ ID NO: 32184 - protein, 518 aa, Arabidopsis thaliana
  misc_feature (1)..(518): Ceres Seq. ID no. 13592372
MVFQSVVAPKPLSPLKPCLPIPRPLVTLPCKLRRGFVRASSSSFLVDDSVSGLERCLQLPSGVELGTSSSGSFSASTQMCPVMKGKFGSVGAVTLEKGKLDMTQKISETSPEIATGGGGGNIGKSINNGGGDGGDDNGDDDDYFDEFDDGDEGDDDGLFRRRMFLAEIFDRKFVDAVLNEWQKTMMDLPAGLRQAYEMGLVSSAQMVKFLAINARPTTTRMISRALPQGLSRAFVGRMLADPAFLYKLLLEQAATVGCSVWWEVKNRKNRLKEEWDLALINVLTVSACNAAAVWLLAPCRSYGNTFRFDLQNTLQKLPNNLFEMSYPLREFDLQKRFHSLFYKAAELSILGLAAGTLQGSLSNVLAGKKKNRVSVTVPSISTNALGYGAFLGIYANLRYQLLCGFERGVSSHFDVIGVALFFGTALRIMNVQLGEKSRQVWLGVEADPLAQSDDLLAKAYNRPSEEAVAKPSSKWFISKNAIVSGLLGKKQEDSVSDSPPPKARRKRIVRKKVAASAS

SEQ ID NO: 32185 - protein, 440 aa, Arabidopsis thaliana
  misc_feature (1)..(440): Ceres Seq. ID no. 13592373
MCPVMKGKFGSVGAVTLEKGKLDMTQKISETSPEIATGGGGGNIGKSINNGGGDGGDDNGDDDDYFDEFDDGDEGDDDGLFRRRMFLAEIFDRKFVDAVLNEWQKTMMDLPAGLRQAYEMGLVSSAQMVKFLAINARPTTTRMISRALPQGLSRAFVGRMLADPAFLYKLLLEQAATVGCSVWWEVKNRKNRLKEEWDLALINVLTVSACNAAAVWLLAPCRSYGNTFRFDLQNTLQKLPNNLFEMSYPLREFDLQKRFHSLFYKAAELSILGLAAGTLQGSLSNVLAGKKKNRVSVTVPSISTNALGYGAFLGIYANLRYQLLCGFERGVSSHFDVIGVALFFGTALRIMNVQLGEKSRQVWLGVEADPLAQSDDLLAKAYNRPSEEAVAKPSSKWFISKNAIVSGLLGKKQEDSVSDSPPPKARRKRIVRKKVAASAS

SEQ ID NO: 32186 - DNA, 1337 bp, Arabidopsis thaliana
  misc_feature (1)..(1337): Ceres Seq. ID no. 13592378
gatccagaaaaaaaaaacgaaaaaaaacaaaaagaaataataaaacaaaaaacactttttatttttaaataaaaataaaataaaaaatgggatacacaaatgtgtccattttattaggtctgttggtggtctttgttacaccgatggtgttcgcagatgatgtgacaccaatcccagagggcaaaccccaagtggcgcagtggttcaatgccaacgttggtccattggctcaacgtaaaggcttagatcctgctcttgtagctgctgaggctgctccacgtatcatcaacgtgaatccaaagggtggtgaattcaaaacactaacggacgcaataaagagcgttcctgcagggaacacaaagcgggtgatcataaagatggctcctggtgagtacaaagagaaggtcactattgacaggaacaaacccttcattacattgatgggacaacccaatgccatgcctgttatcacctatgacggtaccgccgccaagtatggaaccgttgatagcgcctctctcataatcttatccgactatttcatggccgttaacatcgtcgttaagaacactgcgccggcaccagatggtaaaactaagggagcacaagctttatccatgagaatctccggaaattttgctgctttctacaactgcaaattctacggtttccaagacacaatctgtgacgatacaggaaaccatttcttcaaggattgttacgttgaaggaacattcgatttcatcttcggaagtggaacctctatgtacttgggaacacaattgcacgtggttggagacggtattagagtgatagcagcgcatgcaggaaagagcgcagaagagaagagtggatactctttcgtgcactgcaaggtgactggaaccggtggaggaatttatttgggaagagcatggatgagccaccctaaggttgtttatgcctacaccgagatgaccagcgttgtcaaccccaccggatggcaagaaaacaagactcccgcacatgacaaaaccgtgttctacggagagtacaagtgttcaggaccaggatcacacaaagccaagagagtaccattcacacaagacattgacgacaaagaagctaaccgtttcctatccctcggctacatccaaggatccaagtggcttctcccaccacccgctttgtaaactcttcaatatcaagtctaaaatcatattttgcacatatatcacttttaacaaaaaaattatttttacatatatcacttttagcaaactttttctttacctagtcgtcactacttacgaccctatgtatgcttttatgcaaagaaccgagaggtcgataatctg

SEQ ID NO: 32187 - protein, 361 aa, Arabidopsis thaliana
  misc_feature (1)..(361): Ceres Seq. ID no. 13592379
MGYTNVSILLGLLVVFVTPMVFADDVTPIPEGKPQVAQWFNANVGPLAQRKGLDPALVAAEAAPRIINVNPKGGEFKTLTDAIKSVPAGNTKRVIIKMAPGEYKEKVTIDRNKPFITLMGQPNAMPVITYDGTAAKYGTVDSASLIILSDYFMAVNIVVKNTAPAPDGKTKGAQALSMRISGNFAAFYNCKFYGFQDTICDDTGNHFFKDCYVEGTFDFIFGSGTSMYLGTQLHVVGDGIRVIAAHAGKSAEEKSGYSFVHCKVTGTGGGIYLGRAWMSHPKVVYAYTEMTSVVNPTGWQENKTPAHDKTVFYGEYKCSGPGSHKAKRVPFTQDIDDKEANRFLSLGYIQGSKWLLPPPAL

SEQ ID NO: 32188 - protein, 342 aa, Arabidopsis thaliana; identical to SEQ ID NO: 28730
  misc_feature (1)..(342): Ceres Seq. ID no. 13592380

SEQ ID NO: 32189 - protein, 264 aa, Arabidopsis thaliana; identical to SEQ ID NO: 29160
  misc_feature (1)..(264): Ceres Seq. ID no. 13592381

SEQ ID NO: 32190 - DNA, 1546 bp, Arabidopsis thaliana
  misc_feature (1)..(1546): Ceres Seq. ID no. 13592390
ggcaaagccctctccttttgcttctggtcctctcgtcccgtttcgccgctctctataggggcaagtgagaggttactgtctctttcttctttcagacactcgagacgagaaaggctcgtatctgattttaccgccaccggaccatctgtgatagacaataatgggttacataggagctcatggtgtagcagctcttcataggtacaaatacagtggagtggatcactcttatcttgccaaatacgtcctccaacctttttggactcgatttgtcaaagtcttccctctatggatgccaccaaacatgataacgcttatggggtttatgtttctagtcacttcctccctgctaggctatatatattcacctcagttggattctcctcctccacgatgggttcacttcgcacatggtttacttctcttcttgtatcagacatttgatgcggttgatgggaagcaagcaagaaggacaaattcctctagccccctaggagagctcttcgatcatggttgtgacgcgcttgcttgtgcgtttgaagccatggcatttggaagcactgcaatgtgtggaagagatactttctggttctgggttatttcagctattccattttatggagctacatgggaacactatttcaccaacacacttattcttccggttatcaatgggcctacagaggggcttgcacttatatttgtcagccacttcttcacagccatcgtcggtgctgaatggtgggctcagcagttagggcagtcaataccattgtttagttgggtgccatttgtgaatgagattcaaacttctagagcagtgctatacatgatgatcgcttttgctgttataccaaccgttgcattcaatgtaacaaatgtctacaaagtcgttcgatcaagaaacgggagcatggtgttagcgttagctatgctgtatcccttcgttgtcttacttggaggagttttgatatgggattacttgtctccaatcaatctcatagcaacatatcctcacttagttgtactcggaactggacttgcatttggatttttagtgggaagaatgattcttgctcacttgtgtgatgagcctaaaggactaaaaacaaacatgtgcatgtcactactctatcttccctttgcacttgcaaatgcgctaaccgcaagattgaatgctggggttcctctagtcgacgaattatgggttcttcttggctactgcatattcacagtgtcattatacttgcactttgcaacatcagtcatccatgagatcactgaggcccttggaatctactgctttaggatcacgcgtaaagaagcttgaaaagaaacctttgacactgcgaatggtcgatatggaccagttggatcggtgatgtatttcttcttcttattcattgttgtctgtttgatcaggataggtgaagttatgtagaactttgtataatgttcttgtttttggatttatgcattgggcaaatacgaaaactattcttgaaatgctacgaaaatgattttagaaggagcatttttttaacct

SEQ ID NO: 32191 - protein, 389 aa, Arabidopsis thaliana
  misc_feature (1)..(389): Ceres Seq. ID no. 13592391
MGYIGAHGVAALHRYKYSGVDHSYLAKYVLQPFWTRFVKVFPLWMPPNMITLMGFMFLVTSSLLGYIYSPQLDSPPPRWVHFAHGLLLFLYQTFDAVDGKQARRTNSSSPLGELFDHGCDALACAFEAMAFGSTAMCGRDTFWFWVISAIPFYGATWEHYFTNTLILPVINGPTEGLALIFVSHFFTAIVGAEWWAQQLGQSIPLFSWVPFVNEIQTSRAVLYMMIAFAVIPTVAFNVTNVYKVVRSRNGSMVLALAMLYPFVVLLGGVLIWDYLSPINLIATYPHLVVLGTGLAFGFLVGRMILAHLCDEPKGLKTNMCMSLLYLPFALANALTARLNAGVPLVDELWVLLGYCIFTVSLYLHFATSVIHEITEALGIYCFRITRKEA

SEQ ID NO: 32192 - protein, 345 aa, Arabidopsis thaliana
  misc_feature (1)..(345): Ceres Seq. ID no. 13592392
MPPNMITLMGFMFLVTSSLLGYIYSPQLDSPPPRWVHFAHGLLLFLYQTFDAVDGKQARRTNSSSPLGELFDHGCDALACAFEAMAFGSTAMCGRDTFWFWVISAIPFYGATWEHYFTNTLILPVINGPTEGLALIFVSHFFTAIVGAEWWAQQLGQSIPLFSWVPFVNEIQTSRAVLYMMIAFAVIPTVAFNVTNVYKVVRSRNGSMVLALAMLYPFVVLLGGVLIWDYLSPINLIATYPHLVVLGTGLAFGFLVGRMILAHLCDEPKGLKTNMCMSLLYLPFALANALTARLNAGVPLVDELWVLLGYCIFTVSLYLHFATSVIHEITEALGIYCFRITRKEA

SEQ ID NO: 32193 - protein, 341 aa, Arabidopsis thaliana
  misc_feature (1)..(341): Ceres Seq. ID no. 13592393
MITLMGFMFLVTSSLLGYIYSPQLDSPPPRWVHFAHGLLLFLYQTFDAVDGKQARRTNSSSPLGELFDHGCDALACAFEAMAFGSTAMCGRDTFWFWVISAIPFYGATWEHYFTNTLILPVINGPTEGLALIFVSHFFTAIVGAEWWAQQLGQSIPLFSWVPFVNEIQTSRAVLYMMIAFAVIPTVAFNVTNVYKVVRSRNGSMVLALAMLYPFVVLLGGVLIWDYLSPINLIATYPHLVVLGTGLAFGFLVGRMILAHLCDEPKGLKTNMCMSLLYLPFALANALTARLNAGVPLVDELWVLLGYCIFTVSLYLHFATSVIHEITEALGIYCFRITRKEA

SEQ ID NO: 32194 - DNA, 1687 bp, Arabidopsis thaliana
  misc_feature (1)..(1687): Ceres Seq. ID no. 13592394
gaaacagagcatttatccattagaaaaaaaaaaaaaagaaaaaaagaatggcaatctctttactcttgtctttttctcatcgcctttgcttcgttaatcttcctcggaaaaaagatccaacgatctaaatggaattttcctcccagccctcctaagtttccggtcatcggaaacttacatcaacttggagaattgcctcacaggtcacttcaacgtctagccgaaaaaatcggagatgttatgcttattcacttagggtttgtccctgtaactgttatctcatcgaaagaagcagctgaagaagtgcttagaactcatgacctaaactgttgcagcaggcctaatcttgttgggacgaggctactttctcggggttttaaagatgttggttttactccatacggtgaagagtggaaggagcggcgtaagttcttggtgcgtgagtttttctctttgaaaaaggttcagtctttcggttatatcagagaggaagaatgtaactttcttgtcaagaaactgttggaatcagccgtggatcaatctccggttgatttgagcaaaacccttttttggctaaccgcgagtgtcatgtttagagttgcttttggacagagtttccacgagagcgagttcatcgataaagacaaggtcgatgagcttgtgtttgaagccgagaccgctcaagctagtttcacttgctctgatttcttccctattgctggacttggttggctcgttgactgtatttccgggcaacacaagaggctcaaagatgttttcttcaagctggatgctctgtttcaatgttggatgtcatgcagaaacaacgtaaagatgattccttgaagctcacaatcaataacatcaaaggaattctaacgaatatatttctcggagggatagacaccggagctcttactatgatatgggcaatgacggagctcgctagaaacccggaagtgatgaagaaagttcaaggcgagatccgagaccgccttggcagaaataaagagagaatcaccgaagaagatatcaataaagttccttacttgaacctagtgatcaaggaaacattcagattacaccatccagttcctcttcttctcccaagggaaacaatggctcacatcaaggttcaaggctatgatattcctcccaagagacggatcttggtcaacgcttgggcgataggaagagatccaaaactctggactaacccggaagagtttaaccccgagagatttatcaatagtcctgtggattataggggacaacatttcgagctcttaccgtttgggtctggacgaaggatatgtcccgggatatcgatgggtatggctactgtagaattgggactcttgaacttactttacttcttcgactggaagttgcctgatgggatgacacataaagatatcgatactgaagaagttggcactcttacaatcgtcaagaaagtaccactaaaacttcttccagttcgatttcagtgatcaaaccaaactccaaactttgaagatgttttgaataaaaatactatgcaaagtatgtaaccctagcttctctaatgtatgtgaagtacgttttccagtaaaatactaagttaaaatttcatatctttactaaaacatgtactgtgtttcctgtgtttcatatctttggaaaataattataaataaatttttct

SEQ ID NO: 32195 - protein, 281 aa, Arabidopsis thaliana
  misc_feature (1)..(281): Ceres Seq. ID no. 13592395
ETEHLSIRKKKKRKKEWQSLYSCLFLIAFASLIFLGKKIQRSKWNFPPSPPKFPVIGNLHQLGELPHRSLQRLAEKIGDVMLIHLGFVPVTVISSKEAAEEVLRTHDLNCCSRPNLVGTRLLSRGFKDVGFTPYGEEWKERRKFLVREFFSLKKVQSFGYIREEECNFLVKKLLESAVDQSPVDLSKTLFWLTASVMFRVAFGQSFHESEFIDKDKVDELVFEAETAQASFTCSDFFPIAGLGWLVDCISGQHKRLKDVFFKLDALFQCWMSCRNNVKMIP

SEQ ID NO: 32196 - protein, 229 aa, Arabidopsis thaliana
  misc_feature (1)..(229): Ceres Seq. ID no. 13592396
MLDVMQKQRKDDSLKLTINNIKGILTNIFLGGIDTGALTMIWAMTELARNPEVMKKVQGEIRDRLGRNKERITEEDINKVPYLNLVIKETFRLHHPVPLLLPRETMAHIKVQGYDIPPKRRILVNAWAIGRDPKLWTNPEEFNPERFINSPVDYRGQHFELLPFGSGRRICPGISMGMATVELGLLNLLYFFDWKLPDGMTHKDIDTEEVGTLTIVKKVPLKLLPVRFQ

SEQ ID NO: 32197 - protein, 225 aa, Arabidopsis thaliana
  misc_feature (1)..(225): Ceres Seq. ID no. 13592397
MQKQRKDDSLKLTINNIKGILTNIFLGGIDTGALTMIWAMTELARNPEVMKKVQGEIRDRLGRNKERITEEDINKVPYLNLVIKETFRLHHPVPLLLPRETMAHIKVQGYDIPPKRRILVNAWAIGRDPKLWTNPEEFNPERFINSPVDYRGQHFELLPFGSGRRICPGISMGMATVELGLLNLLYFFDWKLPDGMTHKDIDTEEVGTLTIVKKVPLKLLPVRFQ

SEQ ID NO: 32198 - DNA, 1055 bp, Arabidopsis thaliana
  misc_feature (1)..(1055): Ceres Seq. ID no. 13592398
gtccaacttttaaaccaacaaaaatgctgaatgtacttcgaaattctaacctgacccttgccgttttgatttgctttgtcttgatagcttcaaagctatgttccgtcgattcctctgtgtatgacccacacaaaaccctgaagcagcggttcgagaagtggcttaaaacccacagcaaattatatggaggaagggatgagtggatgctacggtttgggatatatcagtctaacgtccagttgattgactacatcaactccctccacttgccctttaagctaacggataatagatttgcagatatgaccaattctgagtttaaggcccattttctcgggttgaacacgtcttccttgaggttacacaagaagcagagaccagtttgtgacccagcaggcaatgtcccggacgctgtggactggaggactcaaggtgctgtgactcctatcagaaatcaaggaaaatgcggaggttgctgggcattctctgcagtagcagctattgaaggcatcaacaagattaaaacagggaatttagtgtctctctcagaacaacaactcatagattgtgatgtcggcacttacaacaaaggctgtagtggcggattaatggaaacagcatttgaattcatcaaaaccaatggtggactcgccacggagaccgactacccatacacaggcatagagggtacctgcgaccaagaaaaatccaaaaataaggtagttacgatacaaggataccaaaaggtagcccaaaacgaggcgagcctacaaatcgctgcagctcaacagccagtatcagttggaatcgatgctggtgggtttatctttcagctctactcctccggtgttttcacaaattactgtggaacaaatctcaaccatggagtgactgttgttggatatggagtagaaggcgatcaaaagtactggatcgtaaagaattcatggggaactggctggggtgaagaaggctacatacggatggagcgtggtgtaagtgaagacacgggtaaatgtggtattgctatgatggcaagctatcccttgcagtga

SEQ ID NO: 32199 - protein, 350 aa, Arabidopsis thaliana
  misc_feature (1)..(350): Ceres Seq. ID no. 13592399
PTFKPTKMLNVLRNSNLTLAVLICFVLIASKLCSVDSSVYDPHKTLKQRFEKWLKTHSKLYGGRDEWMLRFGIYQSNVQLIDYINSLHLPFKLTDNRFADMTNSEFKAHFLGLNTSSLRLHKKQRPVCDPAGNVPDAVDWRTQGAVTPIRNQGKCGGCWAFSAVAAIEGINKIKTGNLVSLSEQQLIDCDVGTYNKGCSGGLMETAFEFIKTNGGLATETDYPYTGIEGTCDQEKSKNKVVTIQGYQKVAQNEASLQIAAAQQPVSVGIDAGGFIFQLYSSGVFTNYCGTNLNHGVTVVGYGVEGDQKYWIVKNSWGTGWGEEGYIRMERGVSEDTGKCGIAMMASYPLQ

SEQ ID NO: 32200 - protein, 343 aa, Arabidopsis thaliana
  misc_feature (1)..(343): Ceres Seq. ID no. 13592400
MLNVLRNSNLTLAVLICFVLIASKLCSVDSSVYDPHKTLKQRFEKWLKTHSKLYGGRDEWMLRFGIYQSNVQLIDYINSLHLPFKLTDNRFADMTNSEFKAHFLGLNTSSLRLHKKQRPVCDPAGNVPDAVDWRTQGAVTPIRNQGKCGGCWAFSAVAAIEGINKIKTGNLVSLSEQQLIDCDVGTYNKGCSGGLMETAFEFIKTNGGLATETDYPYTGIEGTCDQEKSKNKVVTIQGYQKVAQNEASLQIAAAQQPVSVGIDAGGFIFQLYSSGVFTNYCGTNLNHGVTVVGYGVEGDQKYWIVKNSWGTGWGEEGYIRMERGVSEDTGKCGIAMMASYPLQ

SEQ ID NO: 32201 - protein, 283 aa, Arabidopsis thaliana
  misc_feature (1)..(283): Ceres Seq. ID no. 13592401
MLRFGIYQSNVQLIDYINSLHLPFKLTDNRFADMTNSEFKAHFLGLNTSSLRLHKKQRPVCDPAGNVPDAVDWRTQGAVTPIRNQGKCGGCWAFSAVAAIEGINKIKTGNLVSLSEQQLIDCDVGTYNKGCSGGLMETAFEFIKTNGGLATETDYPYTGIEGTCDQEKSKNKVVTIQGYQKVAQNEASLQIAAAQQPVSVGIDAGGFIFQLYSSGVFTNYCGTNLNHGVTVVGYGVEGDQKYWIVKNSWGTGWGEEGYIRMERGVSEDTGKCGIAMMASYPLQ

SEQ ID NO: 32202 - DNA, 1766 bp, Arabidopsis thaliana
  misc_feature (1)..(1766): Ceres Seq. ID no. 13592405
atttctttctaatttcttctcttcatgaattaagccaaaccaacaaaaaaaatcatttaattttcgcggagagatggagaaattctcgtacaactcttatccagattcaaccgactcgtcaccgakatctcgtgagatcgaattcgataacccgccgcctccatgggatgatcagaaccmgaaccagcagcaacatagctacaaggtgaagtttatgtgcagctatggcggcaagattcagccacggcctcacgataatcagctcacttacgtaaacggagaaacgaagattctttccgttgatcgcgggattagattccctgttttagcttccaaactctccaccgtatgcggcggcggtgatgkcggcggaggagaagttacgtttaagtatcagcttccgggagaagacttagacgctttgatctcggttacgaacgatgatgatctggagcatatgatgcacgagtacgatcgcttgcttcgtttgtcgtctaagccagcgaggatgcgtttgtttctcttcccggcttcttctggatttggttctcaaagttcgactcaatcgggatcgagatcgcttcgtcgaggcgttgaacactgttcctaggctatctggaatcggagaaatccgtaactgctcctccgaataatgcggattttttgtttggatcggagaaagttgcagctccgccgccgccaccaccggctgaggtgaaattaccggttcctgtggcgttagaaccgcctttgtttaacgatccgcgtgtgattcaaccggatcacgtcgtaaatccgatggaaattcaaagacaaatgcaggaatttcagaggatgcatattagggatcaagaacaacaacaacaacaacaacaggaagctgtatacagaaggaagagtaacgaagacggtttaatagaaaccggaggtggatacttctctccaccgtacatacaaaatcctgcgccaccaccgccacagcagacgattcctcaracgaatccgcaagctcmtccgatgacgactttctggcaaggaaaccacaatccaggagtcgtatttccaacaaccacacatgggattaggattaccagagcaaccagtttacatgatcccatctccatctccatctccggtgtaccacgcgccaccaccrccgcaaccgcaaggygtcatmagaccaatacttacaggacaagtaaaycaaggcggctactatcctcaggtacagagartggcttcagatacttacagagaaccacaccaatcaccgtacaacgtggctcagccacttcaggcacctataggaacaaaagcagcacaacaacaacaacctcctcctcctcagccttttacctctggtcctccaccaccgcaatacaccgcagtaccaccgccacgacaagtagtaggattaccagatacatcagcgtatactcaggtgacttacactggaggaatggggaaacaagtttattacacggaggctccaccgccgcagtaccatggagttggcttacctgtaactggtatgagtgaattgagaactggaccggacgggaagcttgttgctatgaacatggcacctaaagtttcatctcagagttcagattcggctgtttgattgatgaggtatttcatatggttgaatcagattattgttaatctattacaacaaatttcatcatcttttatatatatatatatatatagtgtaattaagatcactttggtgtctgataaataatgtttttttcttttccccc

SEQ ID NO: 32203 - protein, 246 aa, Arabidopsis thaliana
  misc_feature (1)..(246): Ceres Seq. ID no. 15221095
  misc_feature (66)..(66): Xaa is any aa, unknown or other
  misc_feature (72)..(72): Xaa is any aa, unknown or other
  misc_feature (120)..(120): Xaa is any aa, unknown or other
  misc_feature (125)..(125): Xaa is any aa, unknown or other
  misc_feature (127)..(127): Xaa is any aa, unknown or other
  misc_feature (136)..(136): Xaa is any aa, unknown or other
  misc_feature (146)..(146): Xaa is any aa, unknown or other
MEIQRQMQEFQRMHIRDQEQQQQQQQEAVYRRKSNEDGLIETGGGYFSPPYIQNPAPPPPQQTIPXTNPQAXPMTTFWQGNHNPGVVFPTTTHGIRITRATSLHDPISISISGVPRATTXATARXHXTNTYRTSKXRRLLSSGTEXGFRYLQRTTPITVQRGSATSGTYRNKSSTTTTTSSSSAFYLWSSTTAIHRSTTATTSSRITRYISVYSGDLHWRNGETSLLHGGSTAAVPWSWLTCNWYE

SEQ ID NO: 32204 - protein, 240 aa, Arabidopsis thaliana
  misc_feature (1)..(240): Ceres Seq. ID no. 15221096
  misc_feature (60)..(60): Xaa is any aa, unknown or other
  misc_feature (66)..(66): Xaa is any aa, unknown or other
  misc_feature (114)..(114): Xaa is any aa, unknown or other
  misc_feature (119)..(119): Xaa is any aa, unknown or other
  misc_feature (121)..(121): Xaa is any aa, unknown or other
  misc_feature (130)..(130): Xaa is any aa, unknown or other
  misc_feature (140)..(140): Xaa is any aa, unknown or other
MQEFQRMHIRDQEQQQQQQQEAVYRRKSNEDGLIETGGGYFSPPYIQNPAPPPPQQTIPXTNPQAXPMTTFWQGNHNPGVVFPTTTHGIRITRATSLHDPISISISGVPRATTXATARXHXTNTYRTSKXRRLLSSGTEXGFRYLQRTTPITVQRGSATSGTYRNKSSTTTTTSSSSAFYLWSSTTAIHRSTTATTSSRITRYISVYSGDLHWRNGETSLLHGGSTAAVPWSWLTCNWYE

SEQ ID NO: 32205 - protein, 234 aa, Arabidopsis thaliana
  misc_feature (1)..(234): Ceres Seq. ID no. 15221097
  misc_feature (54)..(54): Xaa is any aa, unknown or other
  misc_feature (60)..(60): Xaa is any aa, unknown or other
  misc_feature (108)..(108): Xaa is any aa, unknown or other
  misc_feature (113)..(113): Xaa is any aa, unknown or other
  misc_feature (115)..(115): Xaa is any aa, unknown or other
  misc_feature (124)..(124): Xaa is any aa, unknown or other
  misc_feature (134)..(134): Xaa is any aa, unknown or other
MHIRDQEQQQQQQQEAVYRRKSNEDGLIETGGGYFSPPYIQNPAPPPPQQTIPXTNPQAXPMTTFWQGNHNPGVVFPTTTHGIRITRATSLHDPISISISGVPRATTXATARXHXTNTYRTSKXRRLLSSGTEXGFRYLQRTTPITVQRGSATSGTYRNKSSTTTTTSSSSAFYLWSSTTAIHRSTTATTSSRITRYISVYSGDLHWRNGETSLLHGGSTAAVPWSWLTCNWYE

SEQ ID NO: 32206 - DNA, 1212 bp, Arabidopsis thaliana
  misc_feature (1)..(1212): Ceres Seq. ID no. 13592406
gagagagataaaagagagaaagataatctctataatgtgcacattatctctctcttcttcttcaccttcttgagaaacctcctctccccaaaaacgacgtagtttcacatttctcgacttcttgaatggagtttgaagacaacaacaacaacaacgacgaagagcaagaagaggatatgaatcttcatgaggaagaagaagacgacgacgccgtttacgactctcctcctctctctcgtgttctccccaaagcctcgacagaaagtcatgaaaccaccggaactacttccacaggcggtggcggaggattcatggttgttcacggcggtggagggagcaggtttaggttccgtgagtgtctcaagaaccaagcggtgaacataggaggacacgcggtcgatggttgtggtgagtttatgccagctggaatcgaaggtaccatcgacgctctaaaatgcgccgcttgtggctgtcaccgtaacttccaccgcaaggaattaccttacttccatcacgcgccgccacaacatcagcctcctcctcccccgccagggttttaccgtcttccagctccggttagctaccgaccaccaccgtcacaagctcctcctcttcagctcgctcttccccctccacaaagagagagatcagaagatccaatggagacgtcttcagctgaagcaggaggagggattaggaagaggcataggactaagtttacggctgagcaaaaggaaaggatgttagctttagctgagaggattggatggagaattcagagacaagacgatgaagtgattcagagattttgtcaggagactggtgttccgagacaagttcttaaggtttggttacataacaacaaacacactcttggtaagtcgccttcaccacttcatcatcatcaggctcctcctcctccaccaccacagtcttcgtttcatcatgaacaagaccaaccatgaatcttgaatttctttgatcactagggttttaatttagcttaattaattacttgagaaatttgagagacaaggtttttattgtttaatttatgtacccattttcctctttgatgatgatgttgatgatgttggtgatgatctttaatttctggttaattatgtagtgcattaggagctttttaggtctcttagcaaaatctttgattggcctgactataaattactgacgtccttatttgcatcacat

SEQ ID NO: 32207 - protein, 279 aa, Arabidopsis thaliana
  misc_feature (1)..(279): Ceres Seq. ID no. 13592407
MEFEDNNNNNDEEQEEDMNLHEEEEDDDAVYDSPPLSRVLPKASTESHETTGTTSTGGGGGFMVVHGGGGSRFRFRECLKNQAVNIGGHAVDGCGEFMPAGIEGTIDALKCAACGCHRNFHRKELPYFHHAPPQHQPPPPPPGFYRLPAPVSYRPPPSQAPPLQLALPPPQRERSEDPMETSSAEAGGGIRKRHRTKFTAEQKERMLALAERIGWRIQRQDDEVIQRFCQETGVPRQVLKVWLHNNKHTLGKSPSPLHHHQAPPPPPPQSSFHHEQDQP

SEQ ID NO: 32208 - protein, 262 aa, Arabidopsis thaliana
  misc_feature (1)..(262): Ceres Seq. ID no. 13592408
MNLHEEEEDDDAVYDSPPLSRVLPKASTESHETTGTTSTGGGGGFMVVHGGGGSRFRFRECLKNQAVNIGGHAVDGCGEFMPAGIEGTIDALKCAACGCHRNFHRKELPYFHHAPPQHQPPPPPPGFYRLPAPVSYRPPPSQAPPLQLALPPPQRERSEDPMETSSAEAGGGIRKRHRTKFTAEQKERMLALAERIGWRIQRQDDEVIQRFCQETGVPRQVLKVWLHNNKHTLGKSPSPLHHHQAPPPPPPQSSFHHEQDQP

SEQ ID NO: 32209 - protein, 217 aa, Arabidopsis thaliana
  misc_feature (1)..(217): Ceres Seq. ID no. 13592409
MVVHGGGGSRFRFRECLKNQAVNIGGHAVDGCGEFMPAGIEGTIDALKCAACGCHRNFHRKELPYFHHAPPQHQPPPPPPGFYRLPAPVSYRPPPSQAPPLQLALPPPQRERSEDPMETSSAEAGGGIRKRHRTKFTAEQKERMLALAERIGWRIQRQDDEVIQRFCQETGVPRQVLKVWLHNNKHTLGKSPSPLHHHQAPPPPPPQSSFHHEQDQP

SEQ ID NO: 32210 - DNA, 1647 bp, Arabidopsis thaliana
  misc_feature (1)..(1647): Ceres Seq. ID no. 13592410
atgtttaaaccccaacatatgtatgacagggaatttggtaccggcaacggctacagcaacgggaacggctacaccaatggaaacggccacaccaacggaaacggcaattacaacggcaatggccacgttaatggtaacggaaaagctaacggagccaaggtggtaaagatgaaaccaatggacagtgagttgctgagagagcaaggtcacataatggttgattttattgctgattattacaaaaaccttcaagactcgcctcaagatttccctgttctgtcccaagttcagcctggttatctccgtgacatgttgcctgattcagcacctgaacgacctgaatcgttaaaagaacttctcgacgatgtttcgaagaagataatgccggggataactcattggcaaagcccgagttactttgcatactatgcatcaagcacgagtgtggctggattcttaggagagatgcttaacgccggcctgagcgtcgtcggttttacctggctcacttctcctgccgctactgagctcgaaatcatcgttcttgattggcttgctaaattgctacaactccccgaccattttctctccacaggaaatggaggaggagtaatccaagggacaggatgtgaagcagtgcttgtggtagtattagctgctagagacagaattctgaagaaagttggcaaaacattacttcctcaacttgttgtctatggctctgaccaaacccattctagtttccgaaaagcttgtctgattggtgggatacatgaagaaaacattaggctgctcaaaactgattcttccacaaactatggaatgcctccagaatcacttgaggaagctatttctcatgatctcgctaagggttttatccctttcttcatttgtgccactgttggcacaacgtcttcagcagcggttgatcctttggtcccattggggaacatcgcaaagaaatatgggatatggttgcatgtggatgcagcttatgcagggaatgcatgtatatgtccagaatatcgaaaatttattgacgggattgaaaacgcagactcctttaacatgaatgctcataaatggttatttgctaatcaaacttgttcacctctttgggttaaggatcgatactctctcattgatgctctcaaaacaaatcccgagtatctagaattcaaggtttccaaaaaagatacggtcgtaaattataaagattggcaaatttctctctctcggagattcagatcactgaagttatggatggttttacggctctatggttccgagaacttaagaaactttataagagaccatgtcaatctcgctaagcattttgaagattatgtagctcaagatccaagttttgaggttgtcactactcggtacttttcactcgtttgctttcgccttgcgccagttgacggcgatgaagaccaatgtaacgaacgtaaccgtgaactgcttgcggctgttaactccactggcaagatattcatctctcacacggctctatctggaaaattcgttttacgatttgctgttggtgcaccgttaacggaagagaagcatgtcactgaagcatggcagattatacagaaacatgcctccaaatttacacgcaacgaccattattaataatatttc

SEQ ID NO: 32211 - protein, 545 aa, Arabidopsis thaliana
  misc_feature (1)..(545): Ceres Seq. ID no. 15221098
MFKPQHMYDREFGTGNGYSNGNGYTNGNGHTNGNGNYNGNGHVNGNGKANGAKVVKMKPMDSELLREQGHIMVDFIADYYKNLQDSPQDFPVLSQVQPGYLRDMLPDSAPERPESLKELLDDVSKKIMPGITHWQSPSYFAYYASSTSVAGFLGEMLNAGLSVVGFTWLTSPAATELEIIVLDWLAKLLQLPDHFLSTGNGGGVIQGTGCEAVLVVVLAARDRILKKVGKTLLPQLVVYGSDQTHSSFRKACLIGGIHEENIRLLKTDSSTNYGMPPESLEEAISHDLAKGFIPFFICATVGTTSSAAVDPLVPLGNIAKKYGIWLHVDAAYAGNACICPEYRKFIDGIENADSFNMNAHKWLFANQTCSPLWVKDRYSLIDALKTNPEYLEFKVSKKDTVVNYKDWQISLSRRFRSLKLWMVLRLYGSENLRNFIRDHVNLAKHFEDYVAQDPSFEVVTTRYFSLVCFRLAPVDGDEDQCNERNRELLAAVNSTGKIFISHTALSGKFVLRFAVGAPLTEEKHVTEAWQIIQKHASKFTRNDHY

SEQ ID NO: 32212 - protein, 539 aa, Arabidopsis thaliana
  misc_feature (1)..(539): Ceres Seq. ID no. 15221099
MYDREFGTGNGYSNGNGYTNGNGHTNGNGNYNGNGHVNGNGKANGAKVVKMKPMDSELLREQGHIMVDFIADYYKNLQDSPQDFPVLSQVQPGYLRDMLPDSAPERPESLKELLDDVSKKIMPGITHWQSPSYFAYYASSTSVAGFLGEMLNAGLSVVGFTWLTSPAATELEIIVLDWLAKLLQLPDHFLSTGNGGGVIQGTGCEAVLVVVLAARDRILKKVGKTLLPQLVVYGSDQTHSSFRKACLIGGIHEENIRLLKTDSSTNYGMPPESLEEAISHDLAKGFIPFFICATVGTTSSAAVDPLVPLGNIAKKYGIWLHVDAAYAGNACICPEYRKFIDGIENADSFNMNAHKWLFANQTCSPLWVKDRYSLIDALKTNPEYLEFKVSKKDTVVNYKDWQISLSRRFRSLKLWMVLRLYGSENLRNFIRDHVNLAKHFEDYVAQDPSFEVVTTRYFSLVCFRLAPVDGDEDQCNERNRELLAAVNSTGKIFISHTALSGKFVLRFAVGAPLTEEKHVTEAWQIIQKHASKFTRNDHY

SEQ ID NO: 32213 - protein, 489 aa, Arabidopsis thaliana
  misc_feature (1)..(489): Ceres Seq. ID no. 15221100
MKPMDSELLREQGHIMVDFIADYYKNLQDSPQDFPVLSQVQPGYLRDMLPDSAPERPESLKELLDDVSKKIMPGITHWQSPSYFAYYASSTSVAGFLGEMLNAGLSVVGFTWLTSPAATELEIIVLDWLAKLLQLPDHFLSTGNGGGVIQGTGCEAVLVVVLAARDRILKKVGKTLLPQLVVYGSDQTHSSFRKACLIGGIHEENIRLLKTDSSTNYGMPPESLEEAISHDLAKGFIPFFICATVGTTSSAAVDPLVPLGNIAKKYGIWLHVDAAYAGNACICPEYRKFIDGIENADSFNMNAHKWLFANQTCSPLWVKDRYSLIDALKTNPEYLEFKVSKKDTVVNYKDWQISLSRRFRSLKLWMVLRLYGSENLRNFIRDHVNLAKHFEDYVAQDPSFEVVTTRYFSLVCFRLAPVDGDEDQCNERNRELLAAVNSTGKIFISHTALSGKFVLRFAVGAPLTEEKHVTEAWQIIQKHASKFTRNDHY

SEQ ID NO: 32214 - DNA, 2463 bp, Arabidopsis thaliana
  misc_feature (1)..(2463): Ceres Seq. ID no. 13592423
gactctctcgcgtccatttttttttctcaattcgtcttcaaaaattcgttagatagagaagaatctaaaagtctctctcggtcatcggaatatcttcttctcaggaattcgacgagactattcgaaatcggaaatcgcgctttgaatctgaaactcagaatttagaggacgcttactccaaagaatctagggtgttaactttctaagaaaaggagtttgttaaaacaatgaagtataaagatgagaagtacgagaaagctgagaagggttcaaggattttgcccaagacagttttactgattcttctttgtggactttcgttctatcttggagggttgtattgtgggaagaacataattgaagttagtgatgttgcaaaagctgaatcttcttccttagatgttgatgactctcttcaagtcaaatctgtttctttctcggaatgtagcagtgactaccaagattacactccttgcactgatccaaggaaatggaagaagtatggtactcacaggcttactttcatggagcgacattgtcctcctgtgtttgatagaaagcagtgtctggttcctcctcctgatggctataagccaccgataagatggccaaagagcaaagacgaatgttggtacaggaatgtgccatatgattggattaacaagcagaaatctaaccagaattggctaaggaaagagggtgaaaagttcatttttcctggtgggggtacaatgtttccacatggagtcagtgcctatgtcgatctgatgcaagatttgatccctgaaatgaaagatgggactatacgcacagccattgacactggttgtggggttgcgagctggggaggcgatttgttggaccggggtatcctcacggtatcactcgccccgagggataatcacgaagctcaagtccagtttgctctagaacgtggaattcctgcgattcttggcatcatttccactcaacgtctccctttcccttcaaattcatttgatatggctcattgctcaagatgccttattccgtggacagaatttggtggagtatatcttctggaggttcaccgtatcctaagacctggtggcttctgggtcttatctggtccaccagtcaactatgagaaccgttggaaaggttgggacacaaccattgaagagcagagatcaaactacgagaagctgcaggaattgttatcttcaatgtgcttcaaaatgtatgccaagaaagacgatatcgcagtctggcaaaaatctccagacaatctatgctataacaagttgtctaacgaccctgatgcatacccgccaaaatgtgacgacagccttgagccagattctgcttggtatacaccattacgcccttgcgttgtggttccaagccctaagctaaagaagacggatttggaatctactcccaagtggccagaaagattacacacaactcctgaaagaatctctgatgttcctggaggaaatggtaacgtgtttaaacatgatgatagcaaatggaaaacaagggctaagcattacaagaagctgttacccgcgattggttctgacaaaattcggaatgttatggatatgaacactgcttatggaggtttggctgctgctctggtcaatgatcctttgtgggtcatgaatgtcgtctcttcttatgctgcaaacacacttcccgttgtgtttgatcgtggattgatcggaacatatcatgactggtgtgaagctttttcgacgtatccaagaacttatgatcttcttcacgtagatgggctgtttacatctgaaagccagaggtgtgatatgaaatatgtaatgctggaaatggataggatcttacgtcctagcgggtatgcgattatacgcgaatcgagctacttcgcagattcaattgcttctgttgctaaagagctgagatggagttgccgtaaagaacaaacagagtctgcatcagccaatgagaagctcttgatttgccagaagaagctgtggtattcatctaacgcaagttcagaaacaaattaaataaacaaaaaagaaagaaataataggacaaatcgaaagcttaagcttaaagcttttgttttgttcggaggtatcttgagaacaaagtctcaacaacaacacgcataggttatttgtgttgcttcaaagccaagaaagctattgaaagctgccaattcaattttattatcccagcatatttatcaattttcgttttttttttcgcttttagtatatgcttggtgagaattatatatttcttttatttttaaattgtaactttaaattttactttaaacggtgatgttcgagatttctcgaatgttaggtataatgatttgagatcttcttgtatttttttacacgttaacatgtttggtggtccatttagattaagcgattataaaattttctcttcgtttccctaatgctaataaaatatgagtgttttttc

SEQ ID NO: 32215 - protein, 600 aa, Arabidopsis thaliana
  misc_feature (1)..(600): Ceres Seq. ID no. 13592424
MKYKDEKYEKAEKGSRILPKTVLLILLCGLSFYLGGLYCGKNIIEVSDVAKAESSSLDVDDSLQVKSVSFSECSSDYQDYTPCTDPRKWKKYGTHRLTFMERHCPPVFDRKQCLVPPPDGYKPPIRWPKSKDECWYRNVPYDWINKQKSNQNWLRKEGEKFIFPGGGTMFPHGVSAYVDLMQDLIPEMKDGTIRTAIDTGCGVASWGGDLLDRGILTVSLAPRDNHEAQVQFALERGIPAILGIISTQRLPFPSNSFDMAHCSRCLIPWTEFGGVYLLEVHRILRPGGFWVLSGPPVNYENRWKGWDTTIEEQRSNYEKLQELLSSMCFKMYAKKDDIAVWQKSPDNLCYNKLSNDPDAYPPKCDDSLEPDSAWYTPLRPCVVVPSPKLKKTDLESTPKWPERLHTTPERISDVPGGNGNVFKHDDSKWKTRAKHYKKLLPAIGSDKIRNVMDMNTAYGGLAAALVNDPLWVMNVVSSYAANTLPVVFDRGLIGTYHDWCEAFSTYPRTYDLLHVDGLFTSESQRCDMKYVMLEMDRILRPSGYAIIRESSYFADSIASVAKELRWSCRKEQTESASANEKLLICQKKLWYSSNASSETN

SEQ ID NO: 32216 - protein, 501 aa, Arabidopsis thaliana
  misc_feature (1)..(501): Ceres Seq. ID no. 13592425
MERHCPPVFDRKQCLVPPPDGYKPPIRWPKSKDECWYRNVPYDWINKQKSNQNWLRKEGEKFIFPGGGTMFPHGVSAYVDLMQDLIPEMKDGTIRTAIDTGCGVASWGGDLLDRGILTVSLAPRDNHEAQVQFALERGIPAILGIISTQRLPFPSNSFDMAHCSRCLIPWTEFGGVYLLEVHRILRPGGFWVLSGPPVNYENRWKGWDTTIEEQRSNYEKLQELLSSMCFKMYAKKDDIAVWQKSPDNLCYNKLSNDPDAYPPKCDDSLEPDSAWYTPLRPCVVVPSPKLKKTDLESTPKWPERLHTTPERISDVPGGNGNVFKHDDSKWKTRAKHYKKLLPAIGSDKIRNVMDMNTAYGGLAAALVNDPLWVMNVVSSYAANTLPVVFDRGLIGTYHDWCEAFSTYPRTYDLLHVDGLFTSESQRCDMKYVMLEMDRILRPSGYAIIRESSYFADSIASVAKELRWSCRKEQTESASANEKLLICQKKLWYSSNASSETN

SEQ ID NO: 32217 - protein, 432 aa, Arabidopsis thaliana
  misc_feature (1)..(432): Ceres Seq. ID no. 13592426
MFPHGVSAYVDLMQDLIPEMKDGTIRTAIDTGCGVASWGGDLLDRGILTVSLAPRDNHEAQVQFALERGIPAILGIISTQRLPFPSNSFDMAHCSRCLIPWTEFGGVYLLEVHRILRPGGFWVLSGPPVNYENRWKGWDTTIEEQRSNYEKLQELLSSMCFKMYAKKDDIAVWQKSPDNLCYNKLSNDPDAYPPKCDDSLEPDSAWYTPLRPCVVVPSPKLKKTDLESTPKWPERLHTTPERISDVPGGNGNVFKHDDSKWKTRAKHYKKLLPAIGSDKIRNVMDMNTAYGGLAAALVNDPLWVMNVVSSYAANTLPVVFDRGLIGTYHDWCEAFSTYPRTYDLLHVDGLFTSESQRCDMKYVMLEMDRILRPSGYAIIRESSYFADSIASVAKELRWSCRKEQTESASANEKLLICQKKLWYSSNASSETN

SEQ ID NO: 32218 - DNA, 1136 bp, Arabidopsis thaliana
  misc_feature (1)..(1136): Ceres Seq. ID no. 13592427
gatctttagctttaccaatgaatccaatcctatcttctttgtttgctctctctttgctttcttcactatcaccatcaacacatgcccatcaatgccatttcccagcaatctttaactttggtgactctaactccgataccggcggtctctccgctgcttttggccaagctggtcctcctcacggctcttccttcttcggctcacccgcgggacgatactgcgatggtcgcctcgtcattgacttcatagcggagagtcttggattaccatatctaagcgcgtttctagactccgttggttcaaacttcagccacggcgctaacttcgctaccgcgggatctccgataagagctcttaactctactctacgtcaaagtggattcagcccattttcactcgatgtacagttcgtacaattctataacttccacaacagatctcaaactgttcgtagtcgtggaggagtctacaagacaatgttgcctgaatccgacagcttctcaaaagctttgtacacttttgacattggtcagaacgatctcacagcaggttacttcgctaataaaaccgtagaacaagttgaaaccgaagttcctgagatcataagtcagttcatgaatgctatcaagaatatttatggacaaggagggagatacttctggattcataacactggacctattggttgtttagcttatgtgattgaacggtttccgaataaagcatcagactttgattcacatggatgtgtttctcctttgaaccacttagctcaacaattcaatcacgctttgaaacaagctgtgatcgagctaagaagttctctatctgaagcagccatcacttatgtagatgtctactctctcaagcatgagttgtttgttcacgctcagggtcacgggtttaagggatcgttggtttcgtgttgtggacatggagggaagtataactacaacaagggtatcggatgtgggatgaagaagattgtgaaaggtaaagaggtttacattggaaagccgtgcgatgagcctgataaggctgttgtgtgggacggtgtacacttcacgcaggctgctaacaaattcattttcgataagattgctccagggttaagcaaggcctgtaaaaggcagtga

SEQ ID NO: 32219 - protein, 377 aa, Arabidopsis thaliana
  misc_feature (1)..(377): Ceres Seq. ID no. 13592428
SLALPMNPILSSLFALSLLSSLSPSTHAHQCHFPAIFNFGDSNSDTGGLSAAFGQAGPPHGSSFFGSPAGRYCDGRLVIDFIAESLGLPYLSAFLDSVGSNFSHGANFATAGSPIRALNSTLRQSGFSPFSLDVQFVQFYNFHNRSQTVRSRGGVYKTMLPESDSFSKALYTFDIGQNDLTAGYFANKTVEQVETEVPEIISQFMNAIKNIYGQGGRYFWIHNTGPIGCLAYVIERFPNKASDFDSHGCVSPLNHLAQQFNHALKQAVIELRSSLSEAAITYVDVYSLKHELFVHAQGHGFKGSLVSCCGHGGKYNYNKGIGCGMKKIVKGKEVYIGKPCDEPDKAVVWDGVHFTQAANKFIFDKIAPGLSKACKRQ

SEQ ID NO: 32220 - protein, 372 aa, Arabidopsis thaliana
  misc_feature (1)..(372): Ceres Seq. ID no. 13592429
MNPILSSLFALSLLSSLSPSTHAHQCHFPAIFNFGDSNSDTGGLSAAFGQAGPPHGSSFFGSPAGRYCDGRLVIDFIAESLGLPYLSAFLDSVGSNFSHGANFATAGSPIRALNSTLRQSGFSPFSLDVQFVQFYNFHNRSQTVRSRGGVYKTMLPESDSFSKALYTFDIGQNDLTAGYFANKTVEQVETEVPEIISQFMNAIKNIYGQGGRYFWIHNTGPIGCLAYVIERFPNKASDFDSHGCVSPLNHLAQQFNHALKQAVIELRSSLSEAAITYVDVYSLKHELFVHAQGHGFKGSLVSCCGHGGKYNYNKGIGCGMKKIVKGKEVYIGKPCDEPDKAVVWDGVHFTQAANKFIFDKIAPGLSKACKRQ

SEQ ID NO: 32221 - protein, 219 aa, Arabidopsis thaliana
  misc_feature (1)..(219): Ceres Seq. ID no. 13592430
MLPESDSFSKALYTFDIGQNDLTAGYFANKTVEQVETEVPEIISQFMNAIKNIYGQGGRYFWIHNTGPIGCLAYVIERFPNKASDFDSHGCVSPLNHLAQQFNHALKQAVIELRSSLSEAAITYVDVYSLKHELFVHAQGHGFKGSLVSCCGHGGKYNYNKGIGCGMKKIVKGKEVYIGKPCDEPDKAVVWDGVHFTQAANKFIFDKIAPGLSKACKRQ

SEQ ID NO: 32222 - DNA, 1184 bp, Arabidopsis thaliana
  misc_feature (1)..(1184): Ceres Seq. ID no. 13592432
gaactcacacatttagcatcatcaaggatcgaaaacattaagtagctagttaagagagagagagagagatggagatgaacattaagtttccagttatagacttgtctaagctcaatggtgaagagagagaccaaaccatggctttgatcgacgatgcttgtcaaaactggggcttcttcgagctggtgaaccatggactaccatatgatctaatggacaacattgagaggatgacaaaggaacactacaagaaacatatggaacaaaagttcaaagaaatgcttcgttccaaaggtttagataccctcgagaccgaagttgaagatgtcgattgggaaagcactttctacctccatcatctccctcaatctaacctatacgacatccctgatatgtcaaatgaataccgattggcaatgaaggattttgggaagaggcttgagattctagctgaagagctattggacttgttgtgtgagaatctagggttggagaaagggtacttgaagaaggtgtttcatgggacaacgggtccaacttttgcgacaaagcttagcaactatccaccatgtcctaaaccagagatgatcaaagggcttagggctcacacagatgcaggaggcctcattttgctgtttcaagatgataaggtcagtggtctccagcttcttaaagatggtgattgggttgatgttcctcctctcaagcattccattgtcatcaaccttggtgaccaacttgaggtgataacaaacgggaagtacaagagtgtaatgcaccgtgtgatgacccagaaagaaggaaacaggatgtctatcgcgtcgttttacaaccccggaagcgatgctgagatctctccggcaacatctcttgtggataaagactcaaaatacccaagctttgtgtttgatgactacatgaaactctatgccggactcaagtttcaggccaaggagccacggttcgaggcgatgaaaaatgctgaagcagctgcggatttgaatccggtggctgtggttgagacattctaaatggatgtgggatcttctacgaaagctaaaagtatatgatgataaaaagatgtgtggtaatgtcaataaaaggattggggttgatgttagtaaaatcaataactaagtgatgaatattatgtgttaagcgtgggagtgagtgactatttatgc

SEQ ID NO: 32223 - protein, 320 aa, Arabidopsis thaliana
  misc_feature (1)..(320): Ceres Seq. ID no. 13592433
MEMNIKFPVIDLSKLNGEERDQTMALIDDACQNWGFFELVNHGLPYDLMDNIERMTKEHYKKHMEQKFKEMLRSKGLDTLETEVEDVDWESTFYLHHLPQSNLYDIPDMSNEYRLAMKDFGKRLEILAEELLDLLCENLGLEKGYLKKVFHGTTGPTFATKLSNYPPCPKPEMIKGLRAHTDAGGLILLFQDDKVSGLQLLKDGDWVDVPPLKHSIVINLGDQLEVITNGKYKSVMHRVMTQKEGNRMSIASFYNPGSDAEISPATSLVDKDSKYPSFVFDDYMKLYAGLKFQAKEPRFEAMKNAEAAADLNPVAVVETF

SEQ ID NO: 32224 - protein, 318 aa, Arabidopsis thaliana
  misc_feature (1)..(318): Ceres Seq. ID no. 13592434
MNIKFPVIDLSKLNGEERDQTMALIDDACQNWGFFELVNHGLPYDLMDNIERMTKEHYKKHMEQKFKEMLRSKGLDTLETEVEDVDWESTFYLHHLPQSNLYDIPDMSNEYRLAMKDFGKRLEILAEELLDLLCENLGLEKGYLKKVFHGTTGPTFATKLSNYPPCPKPEMIKGLRAHTDAGGLILLFQDDKVSGLQLLKDGDWVDVPPLKHSIVINLGDQLEVITNGKYKSVMHRVMTQKEGNRMSIASFYNPGSDAEISPATSLVDKDSKYPSFVFDDYMKLYAGLKFQAKEPRFEAMKNAEAAADLNPVAVVETF

SEQ ID NO: 32225 - protein, 297 aa, Arabidopsis thaliana
  misc_feature (1)..(297): Ceres Seq. ID no. 13592435
MALIDDACQNWGFFELVNHGLPYDLMDNIERMTKEHYKKHMEQKFKEMLRSKGLDTLETEVEDVDWESTFYLHHLPQSNLYDIPDMSNEYRLAMKDFGKRLEILAEELLDLLCENLGLEKGYLKKVFHGTTGPTFATKLSNYPPCPKPEMIKGLRAHTDAGGLILLFQDDKVSGLQLLKDGDWVDVPPLKHSIVINLGDQLEVITNGKYKSVMHRVMTQKEGNRMSIASFYNPGSDAEISPATSLVDKDSKYPSFVFDDYMKLYAGLKFQAKEPRFEAMKNAEAAADLNPVAVVETF

SEQ ID NO: 32226 - DNA, 1005 bp, Arabidopsis thaliana
  misc_feature (1)..(1005): Ceres Seq. ID no. 13592440
gaggatgtctctattgtttcttcttcactctttttgccacaatctctgttccaagaatcgcgagtatggcgaccacacttcattgtctctccacactccatcttcttcctcgcactcatcaccctaaaaccctaaactctctcaaaccaatcaccaccaaatcacaaccatgtaaaaccccagaaataccctccactcccaacgctcttcagctccttaaatcatcctctctccctctcgcagtcatcgcattgcctttcttcctcgacccacaggatgcagcagcagctggaggagaattcggaatattagaagggagatcatttgcgttgatacacccaattgtgatgggaggtttatttgcatacactctttggactggttacttaggttggcaatggagacgtgtccgtacgatacagagtgagattagtgatctcaagaaacagcttaaaccaactcctgtttcccctgatggttccacagccgttgattcttcgtcgcctccttctacgactgagcttcagatccaacggctaactgaagagaggaaagagttggtcaaagggtcttacagagacaaacactttgacgctggctctgttttgttaggtttcggtgttttggaagctgtctttggtggtgttaacacttatcttcgtactggtaaactcttccccggtcctcatctttacgccggtgcaggaataacggtgttgtgggcggcggcggcagcattggtgccggcaatgcagaaagggaacgatacggcgaggagtctacatatagcgttgaatgcagtaaatgttcttcttttcatttggcaaatcccaacaggtcttgatatcgttcttaaggtctttgagttcactaaatggccatagatattaatatttggatgtgttatttatgagtttgtgactctatatatgcaaatattcttcaactttttttgaggtttgtagatgatgaattgtaaaaatcatgcaattagagtggatattg

SEQ ID NO: 32227 - protein, 293 aa, Arabidopsis thaliana
  misc_feature (1)..(293): Ceres Seq. ID no. 13592441
GCLYCFFFTLFATISVPRIASMATTLHCLSTLHLLPRTHHPKTLNSLKPITTKSQPCKTPEIPSTPNALQLLKSSSLPLAVIALPFFLDPQDAAAAGGEFGILEGRSFALIHPIVMGGLFAYTLWTGYLGWQWRRVRTIQSEISDLKKQLKPTPVSPDGSTAVDSSSPPSTTELQIQRLTEERKELVKGSYRDKHFDAGSVLLGFGVLEAVFGGVNTYLRTGKLFPGPHLYAGAGITVLWAAAAALVPAMQKGNDTARSLHIALNAVNVLLFIWQIPTGLDIVLKVFEFTKWP

SEQ ID NO: 32228 - protein, 272 aa, Arabidopsis thaliana
  misc_feature (1)..(272): Ceres Seq. ID no. 13592442
MATTLHCLSTLHLLPRTHHPKTLNSLKPITTKSQPCKTPEIPSTPNALQLLKSSSLPLAVIALPFFLDPQDAAAAGGEFGILEGRSFALIHPIVMGGLFAYTLWTGYLGWQWRRVRTIQSEISDLKKQLKPTPVSPDGSTAVDSSSPPSTTELQIQRLTEERKELVKGSYRDKHFDAGSVLLGFGVLEAVFGGVNTYLRTGKLFPGPHLYAGAGITVLWAAAAALVPAMQKGNDTARSLHIALNAVNVLLFIWQIPTGLDIVLKVFEFTKWP

SEQ ID NO: 32229 - protein, 178 aa, Arabidopsis thaliana
  misc_feature (1)..(178): Ceres Seq. ID no. 13592443
MGGLFAYTLWTGYLGWQWRRVRTIQSEISDLKKQLKPTPVSPDGSTAVDSSSPPSTTELQIQRLTEERKELVKGSYRDKHFDAGSVLLGFGVLEAVFGGVNTYLRTGKLFPGPHLYAGAGITVLWAAAAALVPAMQKGNDTARSLHIALNAVNVLLFIWQIPTGLDIVLKVFEFTKWP

SEQ ID NO: 32230 - DNA, 808 bp, Arabidopsis thaliana
  misc_feature (1)..(808): Ceres Seq. ID no. 13592444
actcacagagacacacaaaacaaatcccaaagcttcagaggaagaagaagaagagagtgagaaacaatggcgtcgacgactctctcaatcgcaacaacaatccgttcctcttctcctctcacttccgcttccactcatcacttcctttccaaacccaccgcaatcgaattcccatttcgtctcagctcttcttctagccaccgtgcaatcaacctccgtcctatctccgccgtcgaagctccggagaaaatcgagaagatcggatccgaaatctcatccctaaccctcgaagaagctcgtatcctcgtcgactatctccaagacaaattcggtgtctccccactctctttagcccccgcagcagcggcggttgctgctccagccgacggtggcgcggcggctgtagtggaggagcaaacaaagttcgatgtggttatcaatgaagttcccagcagttcccgtattgcagtgattaaagctgttagggctttaactagcttggcgttgaaggaagctaaggagctaatcgaaggattaccaaagaagtttaaagaaggtatcactaaagatgaagctgaagaagctaagaagactcttgaagaagctggtgctaaagtctccattgcttaagtttcttcaacaatcggaaaaaaaaaaatgtgatcttttcggaatttatgagtctttttgttgtttagtatagtttgtgtttgagttgttgattcagcttttgagaaattgttgtactttgaatcaatttggtttcgtattacagttttagtcttcaacaagttcttcctctagatgc

SEQ ID NO: 32231 - protein, 187 aa, Arabidopsis thaliana
  misc_feature (1)..(187): Ceres Seq. ID no. 15221104
MASTTLSIATTIRSSSPLTSASTHHFLSKPTAIEFPFRLSSSSSHRAINLRPISAVEAPEKIEKIGSEISSLTLEEARILVDYLQDKFGVSPLSLAPAAAAVAAPADGGAAAVVEEQTKFDVVINEVPSSSRIAVIKAVRALTSLALKEAKELIEGLPKKFKEGITKDEAEEAKKTLEEAGAKVSIA

SEQ ID NO: 32232 - protein, 93 aa, Arabidopsis thaliana
  misc_feature (1)..(93): Ceres Seq. ID no. 15221105
LTETHKTNPKASEEEEEESEKQWRRRLSQSQQQSVPLLLSLPLPLITSFPNPPQSNSHFVSALLLATVQSTSVLSPPSKLRRKSRRSDPKSHP

SEQ ID NO: 32233 - DNA, 1374 bp, Arabidopsis thaliana
  misc_feature (1)..(1374): Ceres Seq. ID no. 13592445
gggaggaaactcaaattgttacagttcacaagtaatctcttcttcaagctttctctctctaccaatttaagtatctctctttcttctcctctctctctctacgaaaactccgttagacccgttctctctgttctaattttattcttcttcgtgttctcgttagggtttttgattctttcaacacagacccaaatcaatttctctcgtgtctttacgatgacctcgaagaacaatggtttgtcagctgcgctcgtttcgaatctccaagatgtgctttcgaagagaaaagtaggaaatgaggaaaaagttggaagcgatggatcggcggaggaggctccgtctacatctgattccgttgatgttgcgtcggtggaggaagagatcgatgattctagacctattgttttagttacgaatggtgatgggattgattcgccagggcttgtttctctcgttgaggctttggttctcgaagggctttacaatgttcatgtttgtgctcctcaaacggacaaatcagcctctgctcattctactactccaggagaaacaatcgctgtaagctctgtaaaactcaaaggtgccacagcctttgaagtttcagggactcctgtggactgcatctcattaggattatctggagcgctttttgcttggtcaaaacctatactggtaattagtggaattaatcagggatcaagctgtggccatcaaatgttctattcaggtgcagttgctggaggcagggaggctttgatttctggggtaccctctttgtcaatatcgttgaattggaagaaaaatgaaagccaagaaagtcactttaaggatgctgttggtgtctgcttacctttgataaacgcaactatcagagacattgcgaaaggagttttccctaaagactgctctctcaacatagaaattccaacatcaccctcatcaaacaagggtttcaaggtaacaaagcaaagcatgtggaggcagtatcctagttggcaagctgtttcagctaatcgtcaccctggtgctgggaatttcatgtccaaccaacaaagtttaggggctcagcttgcccagcttggcagggatgcttcagcggctggggcggctcgtcgttttaccactcagaagaagagtattgtagaaattgaatcagttggtgttgctggtaaaactgatacccgtgttaagaaattctttcgtctagagtttcttgctaaagaacaagaacacacagatgaagatttggatgtcaaggctctagaagatggtttcgtttccgtgactccattttctctccttccaaaaacggattcagaaactcaagccgcagcatcagaatggatctccaaagcccttaactctgatcaatga

SEQ ID NO: 32234 - protein, 457 aa, Arabidopsis thaliana
  misc_feature (1)..(457): Ceres Seq. ID no. 13592446
GRKLKLLQFTSNLFFKLSLSTNLSISLSSPLSLYENSVRPVLSVLILFFFVFSLGFLILSTQTQINFSRVFTMTSKNNGLSAALVSNLQDVLSKRKVGNEEKVGSDGSAEEAPSTSDSVDVASVEEEIDDSRPIVLVTNGDGIDSPGLVSLVEALVLEGLYNVHVCAPQTDKSASAHSTTPGETIAVSSVKLKGATAFEVSGTPVDCISLGLSGALFAWSKPILVISGINQGSSCGHQMFYSGAVAGGREALISGVPSLSISLNWKKNESQESHFKDAVGVCLPLINATIRDIAKGVFPKDCSLNIEIPTSPSSNKGFKVTKQSMWRQYPSWQAVSANRHPGAGNFMSNQQSLGAQLAQLGRDASAAGAARRFTTQKKSIVEIESVGVAGKTDTRVKKFFRLEFLAKEQEHTDEDLDVKALEDGFVSVTPFSLLPKTDSETQAAASEWISKALNSDQ

SEQ ID NO: 32235 - protein, 385 aa, Arabidopsis thaliana
  misc_feature (1)..(385): Ceres Seq. ID no. 13592447
MTSKNNGLSAALVSNLQDVLSKRKVGNEEKVGSDGSAEEAPSTSDSVDVASVEEEIDDSRPIVLVTNGDGIDSPGLVSLVEALVLEGLYNVHVCAPQTDKSASAHSTTPGETIAVSSVKLKGATAFEVSGTPVDCISLGLSGALFAWSKPILVISGINQGSSCGHQMFYSGAVAGGREALISGVPSLSISLNWKKNESQESHFKDAVGVCLPLINATIRDIAKGVFPKDCSLNIEIPTSPSSNKGFKVTKQSMWRQYPSWQAVSANRHPGAGNFMSNQQSLGAQLAQLGRDASAAGAARRFTTQKKSIVEIESVGVAGKTDTRVKKFFRLEFLAKEQEHTDEDLDVKALEDGFVSVTPFSLLPKTDSETQAAASEWISKALNSDQ

SEQ ID NO: 32236 - DNA, 1647 bp, Arabidopsis thaliana
  misc_feature (1)..(1647): Ceres Seq. ID no. 13592448
atggacttgcaactgaaacaatggagaagtcagcagcagaatgagtcagaagaacaaggctctgctgcaactaagatatcaaactttttctttgatcagattcagtcccaaactgctacttctgctgctgcggctcctcttcctctctttgtccctgaacccacttcttcctcttctttctcttgcttctctcctgactcttctaattcttcttcttcttccaggttcctcaagatgggaaacttcttcagctgggcacagtggcaagaacttgagctacaagcactgatctatagatacatgttggctggtgcttctgttcctcaagagcttctcttacctattaagaaaagtctcctccatcaatctcctatgcatttccttcaccatcctcttcaacatagttttcctcatcaccaaccttcttggtattggggaagaggagcaatggatcctgagccagggaggtgtaagagaactgacggcaagaaatggagatgttcaagggatgttgtagcgggccacaagtattgtgaccgccacattcaccgtggaagaaaccgttcaagaaagcctgtggaaaccgccacaaccaccatcacaacgacagccacaacaaccgcatcttcttttgtcttaggtgaggagcttggtcatggaccaaacaacaaccacttcttctcctctggttcatctcaacctctccaccttagtcatcaacaaagttgttcttcagagatgaaacaagaaagcaacaacaacaagaggccatatgaagctaacagtggattcagcaatggaagatcagacgatggtcacatcttgaggcatttctttgacgattggccacgatcatcagactctacctccagtccaatgagctcatccacttgtcatctttcaatctccatgcccggtaacaacacgtcctcagatgtttctctaaaactttccacaggcaatgaagaagaagaagagaacatgagaaataacaacaatgagagggagcaaatgaattggtggagcaatggagggaatcaccacaacaatatgggaggaccattagctgaggctttgaggtcagcttcttcgacgtcaagtgttcttcatcagatgggaatctctactcaagaaatgaagtatgtgaagccattgagcttattgggtaatgcgctgaagaccaaagtgtcagtccctggtcggtttctgggtttagatgttggtgataagtatgttggattagctatctcagatccttcaaatatggttgcttctccattgagtgttttgctcagaaagaaatcaaacattgacctgatggctacagatttccagaacctggtcaaagcattttctgtgtcgggattagtcgttggttatccatttggcaaactgaacaatgtagaggatgttgtcactgtgaatcttttcattgaggaacttcgtaagaccgaaaaactcaaggatgtgaaatacacatattgggacgagcgattatcatcaaagaccgttgaactgatgttgaagcccttgaatttgcatcctgttcaagagaagacaatgttggacaagttagccgcagtagttatacttcaggagtatttagattacgcgaacaggtatgtaaacactgagccagcagagtaa

SEQ ID NO: 32237 - protein, 548 aa, Arabidopsis thaliana
  misc_feature (1)..(548): Ceres Seq. ID no. 15221106
MDLQLKQWRSQQQNESEEQGSAATKISNFFFDQIQSQTATSAAAAPLPLFVPEPTSSSSFSCFSPDSSNSSSSSRFLKMGNFFSWAQWQELELQALIYRYMLAGASVPQELLLPIKKSLLHQSPMHFLHHPLQHSFPHHQPSWYWGRGAMDPEPGRCKRTDGKKWRCSRDVVAGHKYCDRHIHRGRNRSRKPVETATTTITTTATTTASSFVLGEELGHGPNNNHFFSSGSSQPLHLSHQQSCSSEMKQESNNNKRPYEANSGFSNGRSDDGHILRHFFDDWPRSSDSTSSPMSSSTCHLSISMPGNNTSSDVSLKLSTGNEEEEENMRNNNNEREQMNWWSNGGNHHNNMGGPLAEALRSASSTSSVLHQMGISTQEMKYVKPLSLLGNALKTKVSVPGRFLGLDVGDKYVGLAISDPSNMVASPLSVLLRKKSNIDLMATDFQNLVKAFSVSGLVVGYPFGKLNNVEDVVTVNLFIEELRKTEKLKDVKYTYWDERLSSKTVELMLKPLNLHPVQEKTMLDKLAAVVILQEYLDYANRYVNTEPAE

SEQ ID NO: 32238 - protein, 470 aa, Arabidopsis thaliana
  misc_feature (1)..(470): Ceres Seq. ID no. 15221107
MGNFFSWAQWQELELQALIYRYMLAGASVPQELLLPIKKSLLHQSPMHFLHHPLQHSFPHHQPSWYWGRGAMDPEPGRCKRTDGKKWRCSRDVVAGHKYCDRHIHRGRNRSRKPVETATTTITTTATTTASSFVLGEELGHGPNNNHFFSSGSSQPLHLSHQQSCSSEMKQESNNNKRPYEANSGFSNGRSDDGHILRHFFDDWPRSSDSTSSPMSSSTCHLSISMPGNNTSSDVSLKLSTGNEEEEENMRNNNNEREQMNWWSNGGNHHNNMGGPLAEALRSASSTSSVLHQMGISTQEMKYVKPLSLLGNALKTKVSVPGRFLGLDVGDKYVGLAISDPSNMVASPLSVLLRKKSNIDLMATDFQNLVKAFSVSGLVVGYPFGKLNNVEDVVTVNLFIEELRKTEKLKDVKYTYWDERLSSKTVELMLKPLNLHPVQEKTMLDKLAAVVILQEYLDYANRYVNTEPAE

SEQ ID NO: 32239 - protein, 448 aa, Arabidopsis thaliana
  misc_feature (1)..(448): Ceres Seq. ID no. 15221108
MLAGASVPQELLLPIKKSLLHQSPMHFLHHPLQHSFPHHQPSWYWGRGAMDPEPGRCKRTDGKKWRCSRDVVAGHKYCDRHIHRGRNRSRKPVETATTTITTTATTTASSFVLGEELGHGPNNNHFFSSGSSQPLHLSHQQSCSSEMKQESNNNKRPYEANSGFSNGRSDDGHILRHFFDDWPRSSDSTSSPMSSSTCHLSISMPGNNTSSDVSLKLSTGNEEEEENMRNNNNEREQMNWWSNGGNHHNNMGGPLAEALRSASSTSSVLHQMGISTQEMKYVKPLSLLGNALKTKVSVPGRFLGLDVGDKYVGLAISDPSNMVASPLSVLLRKKSNIDLMATDFQNLVKAFSVSGLVVGYPFGKLNNVEDVVTVNLFIEELRKTEKLKDVKYTYWDERLSSKTVELMLKPLNLHPVQEKTMLDKLAAVVILQEYLDYANRYVNTEPAE

SEQ ID NO: 32240 - DNA, 970 bp, Arabidopsis thaliana
  misc_feature (1)..(970): Ceres Seq. ID no. 13592472
gacgccgctcatttttagggtttcagatataggcagattctcacatttgcaaacatgacgactcagatcagcaagaagagaaagtttgtagcggacggtgtgttctacgctgaattgaatgaggttcttacaagagagctagcagaggatggttactctggtgttgaggttagggttactcctatgaggactgagattatcatcagagctacacgtactcagaatgttctcggtgagaaggggaggagaattagggaattgacttcccttgttcagaagagattcaagtttccagttgacagtgttgagctttatgccgagaaggttaacaacagaggtctctgtgccatcgctcaggctgagtctttacgttacaagcttcttggtggtctcgctgttcgtagggcttgctatggtgtgttgaggtttgttatggagagtggagctaagggatgcgaggttatcgtgagtggaaagcttcgtgctgccagagccaagtctatgaagttcaaagatggctacatggtgtcatctggtcaaccaactaaggaatacatagactctgcagtgagacatgttttgcttagacaaggtgtgttgggaatcaaggtgaaggttatgcttgattgggaccctaagggcatatcaggaccaaagacaccattgcctgatgttgtgatcattcattctcctaaagaagaagaggccatctatgcacctgctcaggttgctgccccggctgctctcgtagcagatgcaccactcacagccgtagattaccctgcgatgatcccagtcgcctaaaagaatcctttgtactagtcgatgtgattttgttttcaactgttcttgctcttttgacagattatagcttctcgtatcttcgaatcagacacgtttcctctgttcttattcgaaaattatctcaagtttccattgttgaaaaagccctttttagtttcataaatcg

SEQ ID NO: 32241 - protein, 249 aa, Arabidopsis thaliana
  misc_feature (1)..(249): Ceres Seq. ID no. 13592473
MTTQISKKRKFVADGVFYAELNEVLTRELAEDGYSGVEVRVTPMRTEIIIRATRTQNVLGEKGRRIRELTSLVQKRFKFPVDSVELYAEKVNNRGLCAIAQAESLRYKLLGGLAVRRACYGVLRFVMESGAKGCEVIVSGKLRAARAKSMKFKDGYMVSSGQPTKEYIDSAVRHVLLRQGVLGIKVKVMLDWDPKGISGPKTPLPDVVIIHSPKEEEAIYAPAQVAAPAALVADAPLTAVDYPAMIPVA

SEQ ID NO: 32242 - protein, 206 aa, Arabidopsis thaliana
  misc_feature (1)..(206): Ceres Seq. ID no. 13592474
MRTEIIIRATRTQNVLGEKGRRIRELTSLVQKRFKFPVDSVELYAEKVNNRGLCAIAQAESLRYKLLGGLAVRRACYGVLRFVMESGAKGCEVIVSGKLRAARAKSMKFKDGYMVSSGQPTKEYIDSAVRHVLLRQGVLGIKVKVMLDWDPKGISGPKTPLPDVVIIHSPKEEEAIYAPAQVAAPAALVADAPLTAVDYPAMIPVA

SEQ ID NO: 32243 - DNA, 596 bp, Arabidopsis thaliana
  misc_feature (1)..(596): Ceres Seq. ID no. 13592475
aaatcagaattattgtttttggatcggaaaagagatctagaagaagaagaagaagaagaagaagaagaagaagaagaagaagggggaataatggcattgcaatggctgattctgtcgtatgtggttgccgccgaggtagcgatcgccgtcatcttgactctcccttacccaatgctcctgaagaaacgcatcgtatcacttatctcgctcatactcaatcctgccgcttccatcgtcgccttcgctggatttcaactcctcgatatttactggaagaatgagcataggctattgtgctcatctgaagtttgcactactacagagcgggatcgtcacgagaaatccgtctataaggctcagaggaatggggttctgtgtgcggctgggatccttctctactggtgcatcttccgcatctgcaagtaccacaaagaccttgagcgtttggagcaattagagaagagatacaaggacgagtagaaatcttcccaactgagagtctggtactactgttatagtatcactcggcgtgtgagtagtcccaaaaactgaatgagagcatgatttgatcttgagaaaatttttacacagaccct

SEQ ID NO: 32244 - protein, 159 aa, Arabidopsis thaliana
  misc_feature (1)..(159): Ceres Seq. ID no. 13592476
KSELLFLDRKRDLEEEEEEEEEEEEEEGGIMALQWLILSYVVAAEVAIAVILTLPYPMLLKKRIVSLISLILNPAASIVAFAGFQLLDIYWKNEHRLLCSSEVCTTTERDRHEKSVYKAQRNGVLCAAGILLYWCIFRICKYHKDLERLEQLEKRYKDE

SEQ ID NO: 32245 - protein, 129 aa, Arabidopsis thaliana
  misc_feature (1)..(129): Ceres Seq. ID no. 13592477
MALQWLILSYVVAAEVAIAVILTLPYPMLLKKRIVSLISLILNPAASIVAFAGFQLLDIYWKNEHRLLCSSEVCTTTERDRHEKSVYKAQRNGVLCAAGILLYWCIFRICKYHKDLERLEQLEKRYKDE

SEQ ID NO: 32246 - protein, 102 aa, Arabidopsis thaliana
  misc_feature (1)..(102): Ceres Seq. ID no. 13592478
MLLKKRIVSLISLILNPAASIVAFAGFQLLDIYWKNEHRLLCSSEVCTTTERDRHEKSVYKAQRNGVLCAAGILLYWCIFRICKYHKDLERLEQLEKRYKDE

SEQ ID NO: 32247 - DNA, 738 bp, Arabidopsis thaliana
  misc_feature (1)..(738): Ceres Seq. ID no. 13592500
gatcctcattcatctctaatactaaaatctaatctcttccttgctcactcaccaatcaaactcaaaaaactcttgaatttttcaagaacaaaagaaaaagacatctttaatggcggccatgaactcgagtgttctcacttgcagctacgcaattgctggctctggctcggtagagcttaaccagaaagttggtttggtgaattcatcagttgggtttggtcagaagaaacagatgattatgcctgtgatcaaagctcaacgcgttgttggtgatgatgttgatggatctaatggaagacgatcagccatggttttcttagcagctacactcttctccactgctgctgtttctgcttctgctaatgctggcgtcattgacgaatacctcgagaggagcaaaaccaacaaagaacttaatgataagaagagattggcaacaagtggagcaaactttgcgagagcattcactgttcaattcggaagctgcaagttccctgagaatttcactggctgccaagatcttgccaagcaaaagaaagttccatttatctcagaagatattgctttggaatgcgaaggcaaggacaagtacaagtgtggttccaatgttttctggaaatggtgaagaactttgtttgttttcatctattcttatataaatccaacaatgtatctatctctctctattcatgaaagttctcgcatccatttgaatctatcaagctaaaactctattga

SEQ ID NO: 32248 - protein, 171 aa, Arabidopsis thaliana
  misc_feature (1)..(171): Ceres Seq. ID no. 13592501
MAAMNSSVLTCSYAIAGSGSVELNQKVGLVNSSVGFGQKKQMIMPVIKAQRVVGDDVDGSNGRRSAMVFLAATLFSTAAVSASANAGVIDEYLERSKTNKELNDKKRLATSGANFARAFTVQFGSCKFPENFTGCQDLAKQKKVPFISEDIALECEGKDKYKCGSNVFWKW

SEQ ID NO: 32249 - protein, 168 aa, Arabidopsis thaliana
  misc_feature (1)..(168): Ceres Seq. ID no. 13592502
MNSSVLTCSYAIAGSGSVELNQKVGLVNSSVGFGQKKQMIMPVIKAQRVVGDDVDGSNGRRSAMVFLAATLFSTAAVSASANAGVIDEYLERSKTNKELNDKKRLATSGANFARAFTVQFGSCKFPENFTGCQDLAKQKKVPFISEDIALECEGKDKYKCGSNVFWKW

SEQ ID NO: 32250 - protein, 130 aa, Arabidopsis thaliana
  misc_feature (1)..(130): Ceres Seq. ID no. 13592503
MIMPVIKAQRVVGDDVDGSNGRRSAMVFLAATLFSTAAVSASANAGVIDEYLERSKTNKELNDKKRLATSGANFARAFTVQFGSCKFPENFTGCQDLAKQKKVPFISEDIALECEGKDKYKCGSNVFWKW

SEQ ID NO: 32251 - DNA, 1444 bp, Arabidopsis thaliana
  misc_feature (1)..(1444): Ceres Seq. ID no. 13592512
gattccctctattctcaatccacaccaaagactatatggcctcccattgctccatgagagtaatcctcctcagattctccaatggcgtctcttccagatccattctcaactccactaaccatcgtcttcttagtcttaccatgaccaacactctctcgtctctttcctcaatctctccccacactactacttcgcatttcacggctgcgtcacaacaatcagatgaccagaactgcttccgcaagcttcaactcagaaagatttcgatttcaactcctctttgtatgggtcgtcgttcttccaaaatcgctggtcgaaagggcgctcaagattcaaagaaggcgaagctatactgtagaattggcaaggaggttgtatctgctgtcaagaaagggggtccaaacccagtttcaaatacgactctagctactattcttgacaaagctaaagaactggatgtaccgaaagacattgtggagcgtaatattaagagggcttctgagaaggggcaagaagcttttatagagaagatttacgaggtatatggctacggtggtgttagtatggtagtcgaggtcttaacagacaaaattaatcgatcagtggcagctattagatcggttgttaaggattatgggggaaaaatggctgattcaggatctgtcatgttcaagtttaaaagagttagggtagtgaatataaaggtcaccgaagctgacaaagatcagctccttattattgctttagatgctggagcagaggatgttattgaacccccaacttatgaagatgatactgatgaagacagggaagagaggtactacaaaattgtaacttctaatgagaactactcaacaatattatcaaagctacgtgatgaaggagtgaacttcgagcctgacaatggctctgaactgctccctctgactacagttgaggtggatgatgaggccatggaattgaacaaagagctaatgcagaaactactagaacttgatgatgttgatgctgtttatatcgaccaaaaatgaaaagaatatacattacaggaagctccacttcaagatctgtgaattcacagctcacgagaaagttattatgtcaatctctgaactggttctgctgaactctgcatatattctgaagaaggaataatggtttttggtagacacttacatttcacttcttctagtttccagtttgaagccataaaatcaaaactattataaaagcccaaatcttataatgccgaagggtcttttaatctaaattttgggctgtttcgatttttgggaaattatgaatctaaacattattttagaaattatgagtgatactaggagtgattgtgggctactaccaaacgttattttagaaccacaaataaattcaaaacattattttagaaaaaaaaaaaaaaaaaaaactcgagggggggcccggt

SEQ ID NO: 32252 - protein, 342 aa, Arabidopsis thaliana
  misc_feature (1)..(342): Ceres Seq. ID no. 13592513
FPLFSIHTKDYMASHCSMRVILLRFSNGVSSRSILNSTNHRLLSLTMTNTLSSLSSISPHTTTSHFTAASQQSDDQNCFRKLQLRKISISTPLCMGRRSSKIAGRKGAQDSKKAKLYCRIGKEVVSAVKKGGPNPVSNTTLATILDKAKELDVPKDIVERNIKRASEKGQEAFIEKIYEVYGYGGVSMVVEVLTDKINRSVAAIRSVVKDYGGKMADSGSVMFKFKRVRVVNIKVTEADKDQLLIIALDAGAEDVIEPPTYEDDTDEDREERYYKIVTSNENYSTILSKLRDEGVNFEPDNGSELLPLTTVEVDDEAMELNKELMQKLLELDDVDAVYIDQK

SEQ ID NO: 32253 - protein, 331 aa, Arabidopsis thaliana
  misc_feature (1)..(331): Ceres Seq. ID no. 13592514
MASHCSMRVILLRFSNGVSSRSILNSTNHRLLSLTMTNTLSSLSSISPHTTTSHFTAASQQSDDQNCFRKLQLRKISISTPLCMGRRSSKIAGRKGAQDSKKAKLYCRIGKEVVSAVKKGGPNPVSNTTLATILDKAKELDVPKDIVERNIKRASEKGQEAFIEKIYEVYGYGGVSMVVEVLTDKINRSVAAIRSVVKDYGGKMADSGSVMFKFKRVRVVNIKVTEADKDQLLIIALDAGAEDVIEPPTYEDDTDEDREERYYKIVTSNENYSTILSKLRDEGVNFEPDNGSELLPLTTVEVDDEAMELNKELMQKLLELDDVDAVYIDQK

SEQ ID NO: 32254 - protein, 325 aa, Arabidopsis thaliana
  misc_feature (1)..(325): Ceres Seq. ID no. 13592515
MRVILLRFSNGVSSRSILNSTNHRLLSLTMTNTLSSLSSISPHTTTSHFTAASQQSDDQNCFRKLQLRKISISTPLCMGRRSSKIAGRKGAQDSKKAKLYCRIGKEVVSAVKKGGPNPVSNTTLATILDKAKELDVPKDIVERNIKRASEKGQEAFIEKIYEVYGYGGVSMVVEVLTDKINRSVAAIRSVVKDYGGKMADSGSVMFKFKRVRVVNIKVTEADKDQLLIIALDAGAEDVIEPPTYEDDTDEDREERYYKIVTSNENYSTILSKLRDEGVNFEPDNGSELLPLTTVEVDDEAMELNKELMQKLLELDDVDAVYIDQK

SEQ ID NO: 32255 - DNA, 1556 bp, Arabidopsis thaliana
  misc_feature (1)..(1556): Ceres Seq. ID no. 13592516
gaaaccacatgacacatgtgctccctaaacgtcgccgtgaccagatagctccggtcagagtcattatctctctctcgctcgctctctccatcttcatctctcttgctgaaaaatggcgaactcgagaactgtcttaatcttgtgcggtgactacatggaagactacgaggtgatggttccgttccaagctttacaagctttcggaatcaccgtccacaccgtctgccccggaaagaaagctggtgactcttgccccaccgccgttcacgatttttgtggccaccagacatattttgagtcacgaggtcacaatttcacgctcaatgcaacgtttgatgaagttgaccttagcaagtatgatggattggttataccaggaggacgtgctccagaatacctggccttgactgcatctgttgttgagctggttaaagagttctcaagatctggcaagcccattgcctctatttgccatgggcagttgatattggcagctgcagacacagtcaatggtcgaaaatgtacagcttatgcaactgttggaccttcccttgttgctgcaggtgccaagtgggtcgaaccgataactccggatgtctgtgttgttgatggtagtttgattactgcagctacatatgagggtcatcctgaatttatccagctttttgtcaaggctcttggcggtaaaataactggagcaaataaaaggatcttgtttctttgtggggattatatggaagactatgaagtcaaagtgcctttccagtcccttcaagctttgggatgtcaagttgatgcggtttgtccagagaagaaggctggtgatcgctgcccaactgcaatccatgactttgagggtgaccaaacttacagtgagaaaccaggccacacttttgctttaactactaactttgatgacctagtttcctcgagttatgatgctctggtcattcctggaggcagagcaccagaatatctggccttgaacgaacatgtccttaacatagttaaagagttcatgaattctgagaaaccagttgcgtctatttgccacggacaacagatcttagctgctgctggtgtcctcaagggaaggaaatgcactgcttatccagccgtgaaactgaacgtggtacttggaggaggaacttggctagaaccagatccaatcgacaggtgcttcactgacgggaatctagtaactggcgcagcatggcctggacacccggagtttgtttcacaactaatggctttgttgggcattcaggtttcattctaagttccatgttatgtaaacatcgttatcaagcagaacccatccaacacacttgtctactatggtatatgttactgccatcttttctatctcgtcttttgactagcttactgtcaagtcaatcacttgtgtttcataaagaaccccactgttgatgctttatgtaaagaatgaattctataagacttgtgctagttctcacaattgtaattcataactttcaaactatatccccaattaaaaatacaaacttgctagtgcacattgcaccgaatcttcc

SEQ ID NO: 32256 - protein, 388 aa, Arabidopsis thaliana
  misc_feature (1)..(388): Ceres Seq. ID no. 13592517
MANSRTVLILCGDYMEDYEVMVPFQALQAFGITVHTVCPGKKAGDSCPTAVHDFCGHQTYFESRGHNFTLNATFDEVDLSKYDGLVIPGGRAPEYLALTASVVELVKEFSRSGKPIASICHGQLILAAADTVNGRKCTAYATVGPSLVAAGAKWVEPITPDVCVVDGSLITAATYEGHPEFIQLFVKALGGKITGANKRILFLCGDYMEDYEVKVPFQSLQALGCQVDAVCPEKKAGDRCPTAIHDFEGDQTYSEKPGHTFALTTNFDDLVSSSYDALVIPGGRAPEYLALNEHVLNIVKEFMNSEKPVASICHGQQILAAAGVLKGRKCTAYPAVKLNVVLGGGTWLEPDPIDRCFTDGNLVTGAAWPGHPEFVSQLMALLGIQVSF

SEQ ID NO: 32257 - protein, 374 aa, Arabidopsis thaliana
  misc_feature (1)..(374): Ceres Seq. ID no. 13592518
MEDYEVMVPFQALQAFGITVHTVCPGKKAGDSCPTAVHDFCGHQTYFESRGHNFTLNATFDEVDLSKYDGLVIPGGRAPEYLALTASVVELVKEFSRSGKPIASICHGQLILAAADTVNGRKCTAYATVGPSLVAAGAKWVEPITPDVCVVDGSLITAATYEGHPEFIQLFVKALGGKITGANKRILFLCGDYMEDYEVKVPFQSLQALGCQVDAVCPEKKAGDRCPTAIHDFEGDQTYSEKPGHTFALTTNFDDLVSSSYDALVIPGGRAPEYLALNEHVLNIVKEFMNSEKPVASICHGQQILAAAGVLKGRKCTAYPAVKLNVVLGGGTWLEPDPIDRCFTDGNLVTGAAWPGHPEFVSQLMALLGIQVSF

SEQ ID NO: 32258 - protein, 368 aa, Arabidopsis thaliana
  misc_feature (1)..(368): Ceres Seq. ID no. 13592519
MVPFQALQAFGITVHTVCPGKKAGDSCPTAVHDFCGHQTYFESRGHNFTLNATFDEVDLSKYDGLVIPGGRAPEYLALTASVVELVKEFSRSGKPIASICHGQLILAAADTVNGRKCTAYATVGPSLVAAGAKWVEPITPDVCVVDGSLITAATYEGHPEFIQLFVKALGGKITGANKRILFLCGDYMEDYEVKVPFQSLQALGCQVDAVCPEKKAGDRCPTAIHDFEGDQTYSEKPGHTFALTTNFDDLVSSSYDALVIPGGRAPEYLALNEHVLNIVKEFMNSEKPVASICHGQQILAAAGVLKGRKCTAYPAVKLNVVLGGGTWLEPDPIDRCFTDGNLVTGAAWPGHPEFVSQLMALLGIQVSF

SEQ ID NO: 32259 - DNA, 1503 bp, Arabidopsis thaliana
  misc_feature (1)..(1503): Ceres Seq. ID no. 13592541
gctatcaaacgtagaaagcgaaaactatctttcttcttcctctctctcactatttttctctgtacggtggtgagtgaagaccatcaaaaattgcagaaaataggcttaatctgaatctcttctcctccgtcgaagttttgaattctctctggttctccaattctcctctcgagctgccttaagcttcgcatttacgtttacgttatgcacgaatgagatcatcgtagatcgtgattgaagaagcgagagataaattaggagagcgaagatgagcgagggccagaagttccagttgggaacaatcggcgctttgagtttgtccgttgtgtcatctgtctcgattgtgatctgtaacaaagcgcttattagcacccttggcttcacattcgcgactactttgacaagttggcatcttttggtcacattttgttcccttcatgtggcattatggatgaagatgttcgaacacaagccttttgatccacgagctgtgatgggatttggcatattgaatgggatatccataggactattgaacctcagcctgggctttaattctgtcggtttttaccagatgactaaactagctatcatcccctgcactgttctcttggagaccctcttcttcaggaaaaagttcagtcgaaaaatccagttttcattaaccatccttctccttggtgttggaattgcaaccgtcacagatcttcaacttaatatgctgggttctgtcttgtcgctgctggctgttgtcacaacttgtgttgctcaaattatgacaaataccatccagaagaagttcaaagtttcatccacgcagcttctgtatcagtcttgcccatatcaagcaatcactcttttcgtcactgggccatttttagatgggctcctaaccaatcagaacgtgtttgctttcaagtacacttctcaagtagtgttcttcatcgtcctgtcttgcctcatatcagtctctgtaaacttcagcacatttcttgtcattggaaaaacatctcctgtcacatatcaggttctaggacatctcaaaacatgcctggttctagcatttggctatgtgttgctgcgagacccattcgactggcgcaacattctcggtattctagtggctgtgattggaatggttgtttattcctattactgctcgattgagactcagcagaaggcaagtgaaacctcaactcagttgcctcagatgaaagagagcgagaaggatccgctaatagcagctgaaaatggaagcggagtgttatcagatggcggcgggggagtgcagcaaaagacggtggctcctgtatggaactcaaataaagattttcaagcctaaaagctttgatcatcgctatttttttatataatatcaaactctctttgtattgtccccaaaaaaacacaaactttttaatttctctttttttttttttttgttccctttttaaatatgcatagcagagaagtaggggagactgaaaaatcaacaaaccttcc

SEQ ID NO: 32260 - protein, 357 aa, Arabidopsis thaliana
  misc_feature (1)..(357): Ceres Seq. ID no. 13592542
MSEGQKFQLGTIGALSLSVVSSVSIVICNKALISTLGFTFATTLTSWHLLVTFCSLHVALWMKMFEHKPFDPRAVMGFGILNGISIGLLNLSLGFNSVGFYQMTKLAIIPCTVLLETLFFRKKFSRKIQFSLTILLLGVGIATVTDLQLNMLGSVLSLLAVVTTCVAQIMTNTIQKKFKVSSTQLLYQSCPYQAITLFVTGPFLDGLLTNQNVFAFKYTSQVVFFIVLSCLISVSVNFSTFLVIGKTSPVTYQVLGHLKTCLVLAFGYVLLRDPFDWRNILGILVAVIGMVVYSYYCSIETQQKASETSTQLPQMKESEKDPLIAAENGSGVLSDGGGGVQQKTVAPVWNSNKDFQA

SEQ ID NO: 32261 - protein, 296 aa, Arabidopsis thaliana
  misc_feature (1)..(296): Ceres Seq. ID no. 13592543
MKMFEHKPFDPRAVMGFGILNGISIGLLNLSLGFNSVGFYQMTKLAIIPCTVLLETLFFRKKFSRKIQFSLTILLLGVGIATVTDLQLNMLGSVLSLLAVVTTCVAQIMTNTIQKKFKVSSTQLLYQSCPYQAITLFVTGPFLDGLLTNQNVFAFKYTSQVVFFIVLSCLISVSVNFSTFLVIGKTSPVTYQVLGHLKTCLVLAFGYVLLRDPFDWRNILGILVAVIGMVVYSYYCSIETQQKASETSTQLPQMKESEKDPLIAAENGSGVLSDGGGGVQQKTVAPVWNSNKDFQA

SEQ ID NO: 32262 - protein, 294 aa, Arabidopsis thaliana
  misc_feature (1)..(294): Ceres Seq. ID no. 13592544
MFEHKPFDPRAVMGFGILNGISIGLLNLSLGFNSVGFYQMTKLAIIPCTVLLETLFFRKKFSRKIQFSLTILLLGVGIATVTDLQLNMLGSVLSLLAVVTTCVAQIMTNTIQKKFKVSSTQLLYQSCPYQAITLFVTGPFLDGLLTNQNVFAFKYTSQVVFFIVLSCLISVSVNFSTFLVIGKTSPVTYQVLGHLKTCLVLAFGYVLLRDPFDWRNILGILVAVIGMVVYSYYCSIETQQKASETSTQLPQMKESEKDPLIAAENGSGVLSDGGGGVQQKTVAPVWNSNKDFQA

SEQ ID NO: 32263 - DNA, 1475 bp, Arabidopsis thaliana
  misc_feature (1)..(1475): Ceres Seq. ID no. 13592545
tcagctgctcgatctctctctgatcacaacaatcataagcgatgagaggagctagacccgatgaattcaattttagtacgaatccatcaacgccaaacactggtcagccgacaccgacgtaccccgccggtgttggcggcggcggcggtggaaggaaaaaaggcgttggcgtgaggacgtggttggtacttaactcgtcagggcaatcggagccgaaggaagaagggaaacactccatcatgcggcgaacgggattaccggcgcgtgatcttaggattctcgatccactgttgtcgtatccatctactgttttaggtagagagagagcgattgtcatcaatttggagcatatcaaggcaatcatcactgctcaagaagttttgttgcttaattccaaggatccttcggtctcaccctttattgatgagttgcagaggcggattctctgtcaccatcacgccactaaacctcaggaggagcagaactctgggggagagcctcatacgagggtagatcctgcccaaggagaagctggaacggaacaatcttctggggatcaagggagtgaagccaagaaggatgcgaagcaaagtcttgagaatcaagatggatcgaaggttcttccatttgagtttgttgctctggaagcctgtcttgaagctgcatcaagcagtttggaacatgaggccttaagattggagttagaggctcatccagccctggacaagcttacttccaagatcagtacccttaatttggagcgggttcgacagattaaaagcaggctggttgcaataactggacgtgttcagaaggtgagggatgagctagaacatctgctagacgatgatgaagatatggctgagatgtatcttacagagaagttagctcagaaacttgaggattcgtcaaattcctctatgaatgagagtgataccttcgaggttgatcttcctcaaggagatgaggatgacaggcatgctaacagagatggaaggtatcttcaagcaaatgatgctcacgagcttcttatgagtactcaaagtgcacttagcagaaatagccgtgggactcacacaagctcaacccggagtgccatgaccaacaaattagatgtggaagagcttgaaatgcttttggaagcatatttcgtgcagatcgatggtatactgaacaaactatcaacactaagggaatatgtggatgacacggaggactacatcaacataatgctagatgacaagcagaatcatcttctgcagatgggtgtgatgctaacaacagctactctggtgatgagcgcctttatcgcagttgctggtgtatttggtatgaatataaccatagagttgttcacggataataaacatggtccaagtagattcatttggactgtgattggaggttctatcggcagtatatgcctctacgttggtgccatcgggtggtgcaagtacaagcgccttcttgaatga

SEQ ID NO: 32264 - protein, 477 aa, Arabidopsis thaliana
  misc_feature (1)..(477): Ceres Seq. ID no. 13592546
MRGARPDEFNFSTNPSTPNTGQPTPTYPAGVGGGGGGRKKGVGVRTWLVLNSSGQSEPKEEGKHSIMRRTGLPARDLRILDPLLSYPSTVLGRERAIVINLEHIKAIITAQEVLLLNSKDPSVSPFIDELQRRILCHHHATKPQEEQNSGGEPHTRVDPAQGEAGTEQSSGDQGSEAKKDAKQSLENQDGSKVLPFEFVALEACLEAASSSLEHEALRLELEAHPALDKLTSKISTLNLERVRQIKSRLVAITGRVQKVRDELEHLLDDDEDMAEMYLTEKLAQKLEDSSNSSMNESDTFEVDLPQGDEDDRHANRDGRYLQANDAHELLMSTQSALSRNSRGTHTSSTRSAMTNKLDVEELEMLLEAYFVQIDGILNKLSTLREYVDDTEDYINIMLDDKQNHLLQMGVMLTTATLVMSAFIAVAGVFGMNITIELFTDNKHGPSRFIWTVIGGSIGSICLYVGAIGWCKYKRLLE

SEQ ID NO: 32265 - protein, 411 aa, Arabidopsis thaliana
  misc_feature (1)..(411): Ceres Seq. ID no. 13592547
MRRTGLPARDLRILDPLLSYPSTVLGRERAIVINLEHIKAIITAQEVLLLNSKDPSVSPFIDELQRRILCHHHATKPQEEQNSGGEPHTRVDPAQGEAGTEQSSGDQGSEAKKDAKQSLENQDGSKVLPFEFVALEACLEAASSSLEHEALRLELEAHPALDKLTSKISTLNLERVRQIKSRLVAITGRVQKVRDELEHLLDDDEDMAEMYLTEKLAQKLEDSSNSSMNESDTFEVDLPQGDEDDRHANRDGRYLQANDAHELLMSTQSALSRNSRGTHTSSTRSAMTNKLDVEELEMLLEAYFVQIDGILNKLSTLREYVDDTEDYINIMLDDKQNHLLQMGVMLTTATLVMSAFIAVAGVFGMNITIELFTDNKHGPSRFIWTVIGGSIGSICLYVGAIGWCKYKRLLE

SEQ ID NO: 32266 - DNA, 1314 bp, Arabidopsis thaliana
  misc_feature (1)..(1314): Ceres Seq. ID no. 13592548
tcacggagaatcccatctctttccccacgccaactcaatctttttcgtcgtcaaaagccaaagctttttgcttttttgtcttaatgggtttcatctcttgcatctcatttccgacgatcaattcaagaattctatcgactcaccactttttcaagcactcgacttcagcgtcttcttcatattcacttaagtttgctttgagacgtcaggaggataaacccaaagtctcgttttttcttccattaacgtcttcgttaatggcgacccctattcaagcctcttcttcctccaccattggtgagaccagtgatggcttgaaggtccagtctcatgtttcaattggagcaaacgatctgctgattgttggaccgggtgttcttggacgcttagttgcagaacagtggagacaggaacatccagagtctcaaatctttgggcagacagtaacaacaaatcatcatggtgagttggagaatttgggtatcaaaccatctcttaaaggaaccgaatatgggggaaagttctcctatgtgatcttttgtgctccaccatcacaaagcgctgattatgctggtgaagtcaggaatgcagcatcaaactggaatggcgaaggatcattcttattcacatctagttctgcaccttatgattgctttgataacggagaatgcaacgaggattctccagtagtgccactgggaaagagtccaagaactgatgtgcttttgaaagctgaaaaagtagtgttggaatgtggagggactgtccttagactagcagggctttacacagaaactagaggtgcacatacttactggttgagtaaggagacaattgatgctcgtcctgatcatattctaaatctcatacactatgaggatgcagcatcgctggcagttgcaatcatgaagaagaaagccggtgctcggattttcttgggttgtgacaaccatcctttgtcaaggcaagaggtgatggacctgatggctcaaagcggaaaatttgataagaagttcaaaggttttacaagcaccagtggtcctttagggaagaagctgaacaactctaagacacgagcggagataggatgggagccgaagtatccaagctttgcccaattttttggagtatcgacataatatttttacttggattgattaagaatgtctctagcgctgaagaatccaataatgtgaagcattatttatgtttggtacaaacaaactcatgtatcctcttgagtgatcaaacagctgaaattttcagaattcttcataaaactccatggttcatatatataaatcatattttgtt

SEQ ID NO: 32267 - protein, 378 aa, Arabidopsis thaliana
  misc_feature (1)..(378): Ceres Seq. ID no. 13592549
TENPISFPTPTQSFSSSKAKAFCFFVLMGFISCISFPTINSRILSTHHFFKHSTSASSSYSLKFALRRQEDKPKVSFFLPLTSSLMATPIQASSSSTIGETSDGLKVQSHVSIGANDLLIVGPGVLGRLVAEQWRQEHPESQIFGQTVTTNHHGELENLGIKPSLKGTEYGGKFSYVIFCAPPSQSADYAGEVRNAASNWNGEGSFLFTSSSAPYDCFDNGECNEDSPVVPLGKSPRTDVLLKAEKVVLECGGTVLRLAGLYTETRGAHTYWLSKETIDARPDHILNLIHYEDAASLAVAIMKKKAGARIFLGCDNHPLSRQEVMDLMAQSGKFDKKFKGFTSTSGPLGKKLNNSKTRAEIGWEPKYPSFAQFFGVST

SEQ ID NO: 32268 - protein, 351 aa, Arabidopsis thaliana
  misc_feature (1)..(351): Ceres Seq. ID no. 13592550
MGFISCISFPTINSRILSTHHFFKHSTSASSSYSLKFALRRQEDKPKVSFFLPLTSSLMATPIQASSSSTIGETSDGLKVQSHVSIGANDLLIVGPGVLGRLVAEQWRQEHPESQIFGQTVTTNHHGELENLGIKPSLKGTEYGGKFSYVIFCAPPSQSADYAGEVRNAASNWNGEGSFLFTSSSAPYDCFDNGECNEDSPVVPLGKSPRTDVLLKAEKVVLECGGTVLRLAGLYTETRGAHTYWLSKETIDARPDHILNLIHYEDAASLAVAIMKKKAGARIFLGCDNHPLSRQEVMDLMAQSGKFDKKFKGFTSTSGPLGKKLNNSKTRAEIGWEPKYPSFAQFFGVST

SEQ ID NO: 32269 - protein, 293 aa, Arabidopsis thaliana
  misc_feature (1)..(293): Ceres Seq. ID no. 13592551
MATPIQASSSSTIGETSDGLKVQSHVSIGANDLLIVGPGVLGRLVAEQWRQEHPESQIFGQTVTTNHHGELENLGIKPSLKGTEYGGKFSYVIFCAPPSQSADYAGEVRNAASNWNGEGSFLFTSSSAPYDCFDNGECNEDSPVVPLGKSPRTDVLLKAEKVVLECGGTVLRLAGLYTETRGAHTYWLSKETIDARPDHILNLIHYEDAASLAVAIMKKKAGARIFLGCDNHPLSRQEVMDLMAQSGKFDKKFKGFTSTSGPLGKKLNNSKTRAEIGWEPKYPSFAQFFGVST

SEQ ID NO: 32270 - DNA, 1389 bp, Arabidopsis thaliana
  misc_feature (1)..(1389): Ceres Seq. ID no. 13592556
agacacagagagataagagagagtctgtgtaatcctctcaaagacaaagaagaagattatgttaccctcaagaaaaactaagagagtcttctcctgtgactttactccgggaagaaaacgccgacgatgtgttgttgttccttcctctgtttctccggtaccggaaaacacaaccggagccgatttgctagattcaattccagacgatcttgttatctctatactttgtaaacttggctctacttctcgatgtcctgctgatttcatcaacgttttgctgacatgtaagagattaaaaggattagctatgaatcctattgtgttgtcgagattatctcctaaagctatcgctgttaaagctcataattggtcggaatattctcaccggtttttaaaaaggtgtgtcgacgccggaagtctcgaagcttgttacactctaggaatgattcggttttattgtttacaaaacagaggaaacggcgcgtcgttaatggctaaagccgcgattagttctcacgcgccggcgttatattccttagcagtgattcagttcaacggaagcggtggttcaaagaatgataaagatcttagagccggtgtggctttatgcgcgcgtgccgcttttcttggacacgtcgacgcgctacgtgagctaggtcactgtcttcaagatggttatggagttcctcaaaacgtctctgaaggtaggaggtttttagttcaagccaacgctcgtgaactcgccgccgttttatcttccggtatacaagctaggtcaacgtggctttctttatcacagccaccacctccggttgttcctaaccatggtcaacaaacttgtcctttgcttagtgattttggatgtaatgtaccggcaccggaaacacatcccgcgaataggtttttagcggattggttcgctgttcgcggcggagattgtcccggagatgggttgagattgtgttcacacgctggttgtggacgaccggagacgaggaagcatgagtttaggagatgttcggtttgtggcgttgttaattattgttcacgcgcttgtcaagctttagattggaaactccggcataaaatggattgtgctccggtgcaacggtggctagaggaaggtgacggtggtgaaggtaacgttcagattgacggaaatggtaacggtgataatgttttgcttccaatgagttaacggcaatgtaacggctgctttgaatagtaaaaaaaaacgacgagagatgaggtaaacggaagctagtttcgtttttttttttttgctattagtagaaaagattaggataaaaaattactatcgagtagagtaatttttgtaattccaatctattgtaaagaagagttataaaatgaacggcttttattttt

SEQ ID NO: 32271 - protein, 379 aa, Arabidopsis thaliana
  misc_feature (1)..(379): Ceres Seq. ID no. 15221119
MLPSRKTKRVFSCDFTPGRKRRRCVVVPSSVSPVPENTTGADLLDSIPDDLVISILCKLGSTSRCPADFINVLLTCKRLKGLAMNPIVLSRLSPKAIAVKAHNWSEYSHRFLKRCVDAGSLEACYTLGMIRFYCLQNRGNGASLMAKAAISSHAPALYSLAVIQFNGSGGSKNDKDLRAGVALCARAAFLGHVDALRELGHCLQDGYGVPQNVSEGRRFLVQANARELAAVLSSGIQARSTWLSLSQPPPPVVPNHGQQTCPLLSDFGCNVPAPETHPANRFLADWFAVRGGDCPGDGLRLCSHAGCGRPETRKHEFRRCSVCGVVNYCSRACQALDWKLRHKMDCAPVQRWLEEGDGGEGNVQIDGNGNGDNVLLPMS

SEQ ID NO: 32272 - protein, 296 aa, Arabidopsis thaliana
  misc_feature (1)..(296): Ceres Seq. ID no. 15221120
MNPIVLSRLSPKAIAVKAHNWSEYSHRFLKRCVDAGSLEACYTLGMIRFYCLQNRGNGASLMAKAAISSHAPALYSLAVIQFNGSGGSKNDKDLRAGVALCARAAFLGHVDALRELGHCLQDGYGVPQNVSEGRRFLVQANARELAAVLSSGIQARSTWLSLSQPPPPVVPNHGQQTCPLLSDFGCNVPAPETHPANRFLADWFAVRGGDCPGDGLRLCSHAGCGRPETRKHEFRRCSVCGVVNYCSRACQALDWKLRHKMDCAPVQRWLEEGDGGEGNVQIDGNGNGDNVLLPMS

SEQ ID NO: 32273 - protein, 251 aa, Arabidopsis thaliana
  misc_feature (1)..(251): Ceres Seq. ID no. 15221121
MIRFYCLQNRGNGASLMAKAAISSHAPALYSLAVIQFNGSGGSKNDKDLRAGVALCARAAFLGHVDALRELGHCLQDGYGVPQNVSEGRRFLVQANARELAAVLSSGIQARSTWLSLSQPPPPVVPNHGQQTCPLLSDFGCNVPAPETHPANRFLADWFAVRGGDCPGDGLRLCSHAGCGRPETRKHEFRRCSVCGVVNYCSRACQALDWKLRHKMDCAPVQRWLEEGDGGEGNVQIDGNGNGDNVLLPMS

SEQ ID NO: 32274 - DNA, 1818 bp, Arabidopsis thaliana
  misc_feature (1)..(1818): Ceres Seq. ID no. 13592569
gacaacacttctctcactcaatcgctttctctttgagacgtttgtttagtttcaacaaacaaatcaaaacacacaaagtttgtgtcttcccttaagattcactcaaatctcgcaacacacacattcaacaaatcctgattcataacatctcaccaaatctctcaaaagatctccaaatctaaaatgttcttcttcttcttcttcatctgaatccaaaacaacaatggtgagacgtttcctctcttctcacaaatctctcatcactgttttctggatcgccactttcgcttccttattcatctggcaattcggcggcgtttccacaaatctctactccggtttctcccttttctggtcgtcgtcttcaacaaccaccaccgtcttctccggtggattccccaagctcagacctgtagttttcaatctaacagacttcggtgctgtcggcgatggtgtcacaatcaacactgaagctttcgagaaagctatttataagatctctaagcttgctaagaaaggaggtggtcaacttaatgttcctcctggtcgttggctcactgctccgtttaatctcactagttatatgactcttttcctctctgagaacgctgagattcttgctcttcaggatgaaaagtattggtctttgcttcctcctttaccttcatatggatatggaagagagcatcatggacctcgttatggaagtttcattcatggacagaatcttagagatgttgttgttacagggaataatggtagcatcaacgggcagggacaaacgtggtggaagaagtatcgccaaaagctgcttaaccacacgagaggaccactggtgcagataatgtggtcaagtgacattgtttttgccaatatcactttgcgtgattctccattttggacgcttcacccatatgactgcaaaaatgtcacaatcaccaatatgaccattttggcgcctgtgttcgaagccccaaacactgatggtatcgatccggattcgtgtgaggacatgttaatcgagaactcttacatcagcgttggggatgatggaatcgcaataaagagcggttgggaccagtatggaactacatatggaaaaccttcaaagaacatactcatccgcaacctcatcatccgctccatggttagcgctggtatatcaataggaagtgagatgtctggtggtgtctcgaatatcacagtcgagaatattctgatttggagctcccggcgtggagttaggattaaaaccgcaccaggacgaggtgggtatgtccgggatataacattccggaatgtcacattggatgagttgagagttggtattgtcattaaaacagactacaacgagcacccagatggtggattcaatccccaagcctttccgatactcgagaacataaactacactgggatatacggtcagggagtgcgtgtaccagtgcgtatccaaggaagcaaagagattcctgttaaaaatgtaaccttcagggacatgtcagtggggataacatacaagaaaaagcacatattccagtgtgcgtacgtggaggggcgtgtgataggcaccatcttcccagctccgtgtgataaccttgatcggtatgatgagcaggaacggttggtgaagcaatctgattcccagaatgcaacagatatagactacgagatctgaccaacaagagactgggtttggcctctgcaacaaatttgtttcgttggattttgtacatatacagaggaatctggaaagcaaaggaaattatcggtcagtcagattaaattgtatttgcactcttaaagaggaatttttcc

SEQ ID NO: 32275 - protein, 484 aa, Arabidopsis thaliana
  misc_feature (1)..(484): Ceres Seq. ID no. 13592570
MVRRFLSSHKSLITVFWIATFASLFIWQFGGVSTNLYSGFSLFWSSSSTTTTVFSGGFPKLRPVVFNLTDFGAVGDGVTINTEAFEKAIYKISKLAKKGGGQLNVPPGRWLTAPFNLTSYMTLFLSENAEILALQDEKYWSLLPPLPSYGYGREHHGPRYGSFIHGQNLRDVVVTGNNGSINGQGQTWWKKYRQKLLNHTRGPLVQIMWSSDIVFANITLRDSPFWTLHPYDCKNVTITNMTILAPVFEAPNTDGIDPDSCEDMLIENSYISVGDDGIAIKSGWDQYGTTYGKPSKNILIRNLIIRSMVSAGISIGSEMSGGVSNITVENILIWSSRRGVRIKTAPGRGGYVRDITFRNVTLDELRVGIVIKTDYNEHPDGGFNPQAFPILENINYTGIYGQGVRVPVRIQGSKEIPVKNVTFRDMSVGITYKKKHIFQCAYVEGRVIGTIFPAPCDNLDRYDEQERLVKQSDSQNATDIDYEI

SEQ ID NO: 32276 - protein, 364 aa, Arabidopsis thaliana
  misc_feature (1)..(364): Ceres Seq. ID no. 13592571
MTLFLSENAEILALQDEKYWSLLPPLPSYGYGREHHGPRYGSFIHGQNLRDVVVTGNNGSINGQGQTWWKKYRQKLLNHTRGPLVQIMWSSDIVFANITLRDSPFWTLHPYDCKNVTITNMTILAPVFEAPNTDGIDPDSCEDMLIENSYISVGDDGIAIKSGWDQYGTTYGKPSKNILIRNLIIRSMVSAGISIGSEMSGGVSNITVENILIWSSRRGVRIKTAPGRGGYVRDITFRNVTLDELRVGIVIKTDYNEHPDGGFNPQAFPILENINYTGIYGQGVRVPVRIQGSKEIPVKNVTFRDMSVGITYKKKHIFQCAYVEGRVIGTIFPAPCDNLDRYDEQERLVKQSDSQNATDIDYEI

SEQ ID NO: 32277 - protein, 277 aa, Arabidopsis thaliana
  misc_feature (1)..(277): Ceres Seq. ID no. 13592572
MWSSDIVFANITLRDSPFWTLHPYDCKNVTITNMTILAPVFEAPNTDGIDPDSCEDMLIENSYISVGDDGIAIKSGWDQYGTTYGKPSKNILIRNLIIRSMVSAGISIGSEMSGGVSNITVENILIWSSRRGVRIKTAPGRGGYVRDITFRNVTLDELRVGIVIKTDYNEHPDGGFNPQAFPILENINYTGIYGQGVRVPVRIQGSKEIPVKNVTFRDMSVGITYKKKHIFQCAYVEGRVIGTIFPAPCDNLDRYDEQERLVKQSDSQNATDIDYEI

SEQ ID NO: 32278 - DNA, 1850 bp, Arabidopsis thaliana
  misc_feature (1)..(1850): Ceres Seq. ID no. 13592577
ggactctcgttcggccgtttcatcaacaactctctcctgtaaacgaaacaaagaaatggctggacaaaagcaagagcttcccgtctccggcgaacctttagccgtcgagagtccgatgaccaacaagaagaagaagaaaagcaagaagaacaaacatacagaggaaaatcatgaagtcgaagaagtgcctcaagaggtcactaatggtgtagaggaagagttgagtaataaagagaagaagaagaaacgtaagagagaggagaaagagtctgagaagaataagaagaaggatgtcccggagaagaagcttgaagctgaggatttaggagaaggagagagtgaacaacagaaggttgttgtgactgggaaaggtgtggaagaagcaaagtacgcagctttgaagacttttgctgaatcgaatttgccggagaatgttttagattgttgtaagactttcgagaagccgtctccgattcagtcacatacgtggccgtttttgttagatgggcgtgatcttatcgggattgcgaaaactgggtcaggtaagacattggcttttgggattcctgcgattatgcatgtgttgaagaaaaataagaagattggtggaggatcaaagaaggttaatcctacttgtttagttctttctcctacacgagaattggctgttcagatttctgatgttttgcgtgaagctggagaaccgtgtggtttgaaatcgatttgtgtgtatggtggaagctctaaagggcctcaaataagtgcaattcgatctggagttgatattgtcattggtacgcctggtcgtttgagagacttgattgagtctaatgtgcttcgtctctcggatgtttcctttgtcgtattggatgaagcagatcgaatgcttgatatgggtttcgaggaacctgtccggtttatattgagtaacacaaataaagttcgtcaaatggttatgttcagtgcaacttggcctttggatgttcacaaattggcccaggaattcatggatccaaatccaatcaaggtgatcataggttctgtagacttagctgccaaccacgacgttatgcaaatcattgaggtcttggatgaacgtgcgcgtgatcagcgtctcattgcattactagaaaaataccataaatctcaaaagaacagggttttggtatttgctttatacaaggtggaagctgaacgtctcgagcgttttcttcagcaaagaggttggaaagctgtatctatacacggaaacaaagcacagagcgaacgtaccaggtctttatcattgttcaaagaaggatcctgcccgttactggtggctactgatgttgcagcaagagggcttgatatcccggacgtggaagttgtgataaactacactttccctttaacaacagaggattatgtacacagaatcgggaggacaggaagagcgggtaaaaagggcgttgcacacaccttcttcacgccactgaacaagggtcttgcaggagaacttgtgaatgttcttagggaagcaggacaagtagtgccagctgatcttttgaagtttggcactcatgtaaagaaaaaggaatcaaaattgtatggagctcatttcaaagaaatagctgctgatgctcctaaagctacgaagatcacattcgataattctgatgacgaagactagcttagtttattattttaatggtatcattattttattatatttacttggacaatgaaacctgcatttgattttcgtttgtggtctggggcttggcccgaataacaaaaacaaatatatttcagaattttcattatatttgtatgcaattttgtgttactagttattaaacttttatttgtcc

SEQ ID NO: 32279 - protein, 555 aa, Arabidopsis thaliana
  misc_feature (1)..(555): Ceres Seq. ID no. 13592578
DSRSAVSSTTLSCKRNKEMAGQKQELPVSGEPLAVESPMTNKKKKKSKKNKHTEENHEVEEVPQEVTNGVEEELSNKEKKKKRKREEKESEKNKKKDVPEKKLEAEDLGEGESEQQKVVVTGKGVEEAKYAALKTFAESNLPENVLDCCKTFEKPSPIQSHTWPFLLDGRDLIGIAKTGSGKTLAFGIPAIMHVLKKNKKIGGGSKKVNPTCLVLSPTRELAVQISDVLREAGEPCGLKSICVYGGSSKGPQISAIRSGVDIVIGTPGRLRDLIESNVLRLSDVSFVVLDEADRMLDMGFEEPVRFILSNTNKVRQMVMFSATWPLDVHKLAQEFMDPNPIKVIIGSVDLAANHDVMQIIEVLDERARDQRLIALLEKYHKSQKNRVLVFALYKVEAERLERFLQQRGWKAVSIHGNKAQSERTRSLSLFKEGSCPLLVATDVAARGLDIPDVEVVINYTFPLTTEDYVHRIGRTGRAGKKGVAHTFFTPLNKGLAGELVNVLREAGQVVPADLLKFGTHVKKKESKLYGAHFKEIAADAPKATKITFDNSDDED

SEQ ID NO: 32280 - protein, 537 aa, Arabidopsis thaliana
  misc_feature (1)..(537): Ceres Seq. ID no. 13592579
MAGQKQELPVSGEPLAVESPMTNKKKKKSKKNKHTEENHEVEEVPQEVTNGVEEELSNKEKKKKRKREEKESEKNKKKDVPEKKLEAEDLGEGESEQQKVVVTGKGVEEAKYAALKTFAESNLPENVLDCCKTFEKPSPIQSHTWPFLLDGRDLIGIAKTGSGKTLAFGIPAIMHVLKKNKKIGGGSKKVNPTCLVLSPTRELAVQISDVLREAGEPCGLKSICVYGGSSKGPQISAIRSGVDIVIGTPGRLRDLIESNVLRLSDVSFVVLDEADRMLDMGFEEPVRFILSNTNKVRQMVMFSATWPLDVHKLAQEFMDPNPIKVIIGSVDLAANHDVMQIIEVLDERARDQRLIALLEKYHKSQKNRVLVFALYKVEAERLERFLQQRGWKAVSIHGNKAQSERTRSLSLFKEGSCPLLVATDVAARGLDIPDVEVVINYTFPLTTEDYVHRIGRTGRAGKKGVAHTFFTPLNKGLAGELVNVLREAGQVVPADLLKFGTHVKKKESKLYGAHFKEIAADAPKATKITFDNSDDED

SEQ ID NO: 32281 - protein, 517 aa, Arabidopsis thaliana
  misc_feature (1)..(517): Ceres Seq. ID no. 13592580
MTNKKKKKSKKNKHTEENHEVEEVPQEVTNGVEEELSNKEKKKKRKREEKESEKNKKKDVPEKKLEAEDLGEGESEQQKVVVTGKGVEEAKYAALKTFAESNLPENVLDCCKTFEKPSPIQSHTWPFLLDGRDLIGIAKTGSGKTLAFGIPAIMHVLKKNKKIGGGSKKVNPTCLVLSPTRELAVQISDVLREAGEPCGLKSICVYGGSSKGPQISAIRSGVDIVIGTPGRLRDLIESNVLRLSDVSFVVLDEADRMLDMGFEEPVRFILSNTNKVRQMVMFSATWPLDVHKLAQEFMDPNPIKVIIGSVDLAANHDVMQIIEVLDERARDQRLIALLEKYHKSQKNRVLVFALYKVEAERLERFLQQRGWKAVSIHGNKAQSERTRSLSLFKEGSCPLLVATDVAARGLDIPDVEVVINYTFPLTTEDYVHRIGRTGRAGKKGVAHTFFTPLNKGLAGELVNVLREAGQVVPADLLKFGTHVKKKESKLYGAHFKEIAADAPKATKITFDNSDDED

SEQ ID NO: 32282 - DNA, 1620 bp, Arabidopsis thaliana
  misc_feature (1)..(1620): Ceres Seq. ID no. 13592581
aattacctatcttgcttcttcaatatttaatttatatttattatagcatcacttccaaaaaaaaatcagaagaagaagatagagagaaagaaagagagagatatcgacaacaacaatggaagattcaagcaaaaaaagccaaaagaagaagaagaacaaaagcaagaacaacatcccaactgtttggttctcactcaagaaatccctccactgtaaatccgaaccatctgatgtccacgacccaatatccaccactaaacagcaacaacacctctccacaatctccaccaagaaaatctccggcatatcatccggcggagccgccgtatgcggtggtggtttatcaggatgttcaagatcaatagcaaatctcaaagacgtaatccatggaagcaaaagacatttcgagaaaccaccaataagtagtcctcgttctattggaagcaatgagtttctaaatcctataactcatgaagttattcttagtaactcaacttgtgagcttaagatcactggtgtcggagacatggcttcacctgtcggagcagcggattccggcggaggtggcggtggaggaaatggtcggtctacgacttatgtagggatgcttagaccaggaacaccgatgcattatcttaaccattcagcttcttacaggagccaaacaagaaagggttcgtttgctttgtcggagagagatcgaggaggaggaggaggaggagaagggttagggtttcatacaaacagaagggtttcattggagatgaacagagaatccaccattaatggaggcaacaattcctctgtttcttgtcataaatgtggtgaacagttcaataagcttgaagctgctgaagctcatcatctctctaaacatgccgtaacggagcttgtagaaggagattcatcaagaaaaatagtggagataatctgcagaacaagctggttaaagtcagagaaccaatgtggaagaatcgatagagttttaaaagtacacaacatgcagaagacattagctagattcgaggaatacagagaaacagttaaaatcagagcaagcaaacttcagaagaagcatccaagatgtctcgcagacggtaacgagctacttaggttccacggaaccaccgtggcttgtggtttaggtataaacgggtcaacaagtgtttgcacggcggagaaatgttgtgtctgtcggattatacgaaacgggttctcgtcgaaacgggagaagaataatggggttggtgttttcacggcgtctactagtggaagagcgttcgagtcgattttggttaacggtggagatgagagtggagatgttgatcggacggtgaggaaagtgttgattgtgtgtagggttatcgccggaagagttcatcggccggtggagaatgtggaggagatgaatgggttgatgagtgggtttgattctttggctggcaaagttggtttgtatacaaatgtggaggagctttatttgcttaatcctaaagctttgcttccttgctttgtggtcatttgcaagccctaaaacatttagcatgttggggaaaaagattgaattttcttttgttgataaatttatgtatcgtataatgagaattgaaatcaataggt

SEQ ID NO: 32283 - protein, 472 aa, Arabidopsis thaliana
  misc_feature (1)..(472): Ceres Seq. ID no. 15221122
MEDSSKKSQKKKKNKSKNNIPTVWFSLKKSLHCKSEPSDVHDPISTTKQQQHLSTISTKKISGISSGGAAVCGGGLSGCSRSIANLKDVIHGSKRHFEKPPISSPRSIGSNEFLNPITHEVILSNSTCELKITGVGDMASPVGAADSGGGGGGGNGRSTTYVGMLRPGTPMHYLNHSASYRSQTRKGSFALSERDRGGGGGGEGLGFHTNRRVSLEMNRESTINGGNNSSVSCHKCGEQFNKLEAAEAHHLSKHAVTELVEGDSSRKIVEIICRTSWLKSENQCGRIDRVLKVHNMQKTLARFEEYRETVKIRASKLQKKHPRCLADGNELLRFHGTTVACGLGINGSTSVCTAEKCCVCRIIRNGFSSKREKNNGVGVFTASTSGRAFESILVNGGDESGDVDRTVRKVLIVCRVIAGRVHRPVENVEEMNGLMSGFDSLAGKVGLYTNVEELYLLNPKALLPCFVVICKP

SEQ ID NO: 32284 - protein, 335 aa, Arabidopsis thaliana
  misc_feature (1)..(335): Ceres Seq. ID no. 15221123
MASPVGAADSGGGGGGGNGRSTTYVGMLRPGTPMHYLNHSASYRSQTRKGSFALSERDRGGGGGGEGLGFHTNRRVSLEMNRESTINGGNNSSVSCHKCGEQFNKLEAAEAHHLSKHAVTELVEGDSSRKIVEIICRTSWLKSENQCGRIDRVLKVHNMQKTLARFEEYRETVKIRASKLQKKHPRCLADGNELLRFHGTTVACGLGINGSTSVCTAEKCCVCRIIRNGFSSKREKNNGVGVFTASTSGRAFESILVNGGDESGDVDRTVRKVLIVCRVIAGRVHRPVENVEEMNGLMSGFDSLAGKVGLYTNVEELYLLNPKALLPCFVVICKP

SEQ ID NO: 32285 - protein, 309 aa, Arabidopsis thaliana
  misc_feature (1)..(309): Ceres Seq. ID no. 15221124
MLRPGTPMHYLNHSASYRSQTRKGSFALSERDRGGGGGGEGLGFHTNRRVSLEMNRESTINGGNNSSVSCHKCGEQFNKLEAAEAHHLSKHAVTELVEGDSSRKIVEIICRTSWLKSENQCGRIDRVLKVHNMQKTLARFEEYRETVKIRASKLQKKHPRCLADGNELLRFHGTTVACGLGINGSTSVCTAEKCCVCRIIRNGFSSKREKNNGVGVFTASTSGRAFESILVNGGDESGDVDRTVRKVLIVCRVIAGRVHRPVENVEEMNGLMSGFDSLAGKVGLYTNVEELYLLNPKALLPCFVVICKP

SEQ ID NO: 32286 - DNA, 838 bp, Arabidopsis thaliana
  misc_feature (1)..(838): Ceres Seq. ID no. 13592589
attcctctgcggcgtctctctctcttccttatcatcatcatcttcactctaaacttcacagagagccattcaagcagaagaagagctctctgatccttctctgccattttcattattatcctttcttctgtttcagagttttctattcttctcaatcttatctcgcttcgaagtggatcaatatgtcaatgacggaagaaaccaagacgacgaagctcgaatcggcgggagattcgtccgatgtagacaacgggaactgtagtagcagtggaagtggaggtgatacgaagaagacatgcgttgattgtggaacaagcaggactcctctttggcgtggtggacctgctggccctaaatcattgtgcaatgcgtgtgggatcaaaagcagaaagaagagacaagcagctcttggaattagacaagatgatattaaaatcaagagcaaaagtaataacaatcttggtcttgagagccgaaatgtcaagaccggaaaaggcgaaccagttaatgttaagattgcaaaatgtgaaccgggaaatgtcaagattgccaaaggtgaaccaggaaatgtcaagaacaaaatcaagagagatcctgagaattccagtagcagcaataataacaagaagaacgtgaaaagggttggtagatttttggattttgggtttaaggtaccggcgatgaagagatcggctgtggagaagaagaggctatggaggaaacttggggaagaggaacgagccgcagtacttctcatggctctttcttgtggttgagattttgtctcttaaccctttttttttgatgtgtcgtaatggttgagtgaaagagattaggg

SEQ ID NO: 32287 - protein, 257 aa, Arabidopsis thaliana
  misc_feature (1)..(257): Ceres Seq. ID no. 13592590
SSAASLSLPYHHHLHSKLHREPFKQKKSSLILLCHFHYYPFFCFRVFYSSQSYLASKWINMSMTEETKTTKLESAGDSSDVDNGNCSSSGSGGDTKKTCVDCGTSRTPLWRGGPAGPKSLCNACGIKSRKKRQAALGIRQDDIKIKSKSNNNLGLESRNVKTGKGEPVNVKIAKCEPGNVKIAKGEPGNVKNKIKRDPENSSSSNNNKKNVKRVGRFLDFGFKVPAMKRSAVEKKRLWRKLGEEERAAVLLMALSCG

SEQ ID NO: 32288 - protein, 197 aa, Arabidopsis thaliana
  misc_feature (1)..(197): Ceres Seq. ID no. 13592591
MSMTEETKTTKLESAGDSSDVDNGNCSSSGSGGDTKKTCVDCGTSRTPLWRGGPAGPKSLCNACGIKSRKKRQAALGIRQDDIKIKSKSNNNLGLESRNVKTGKGEPVNVKIAKCEPGNVKIAKGEPGNVKNKIKRDPENSSSSNNNKKNVKRVGRFLDFGFKVPAMKRSAVEKKRLWRKLGEEERAAVLLMALSCG

SEQ ID NO: 32289 - protein, 195 aa, Arabidopsis thaliana
  misc_feature (1)..(195): Ceres Seq. ID no. 13592592
MTEETKTTKLESAGDSSDVDNGNCSSSGSGGDTKKTCVDCGTSRTPLWRGGPAGPKSLCNACGIKSRKKRQAALGIRQDDIKIKSKSNNNLGLESRNVKTGKGEPVNVKIAKCEPGNVKIAKGEPGNVKNKIKRDPENSSSSNNNKKNVKRVGRFLDFGFKVPAMKRSAVEKKRLWRKLGEEERAAVLLMALSCG

SEQ ID NO: 32290 - DNA, 1488 bp, Arabidopsis thaliana
  misc_feature (1)..(1488): Ceres Seq. ID no. 13592593
gaaagagaaaaagaaagggggtttgtgttatggctcccataacttttagaaaatcttacactatagtaccggccgaaccaacgtggagcggtaggtttcccttagccgagtgggatcaagttggtacaattactcacattcccaccctttacttttacgacaagccatctgaatctttccaaggcaatgtagtcgaaatcctaaaaacctcgttgagccgtgtgctagtccatttttaccctatggctggccgtctcagatggctccctcggggacggttcgagctcaattgtaacgccgagggagtggaattcattgaagcggaatctgaggggaagctttcggatttcaaagacttctctcctacgccggaattcgagaatcttatgccgcaagtaaactataaaaaccctatcgaaacgattcctctatttttagctcaggtaaccaaattcaaatgcggtggaataagccttagcgtcaacgtttcccacgcgatcgtagatggccaaagcgcgcttcacttaatatcggaatggggaagactcgcgcgcggtgaaccgttagaaaccgttccatttctagaccggaaaatcctctgggctggtgaaccgctcccaccgtttgtgtcgcccccaaagttcgaccacaaagagtttgatcagccaccgtttttgatcggagaaacggacaatgtagaagagagaaagaagaaaacgattgtggtgatgctaccactgagcacatctcagctgcagaagctacgaagtaaagccaacggaagcaaacactctgacccggcgaaagggtttacaaggtacgagaccgtcaccggacacgtgtggaggtgcgcgtgtaaagcacgtggccactctccggagcaaccaacggctctaggaatctgtatagatactcgtagtcggatggagccacctctgccacgcggctacttcggcaatgctactcttgacgtggtcgcagcaagcacctcaggtgaactgatatcgaatgaattgggtttcgcggcgagtttaatcagtaaagccataaagaatgtaacaaacgaatacgtgatgattgggatagagtatcttaagaaccaaaaagatctgaagaagtttcaagatctacatgccttgggaagcacggaaggtccattctacggaaacccaaatcttggagtggtgagctggttaactttgccaatgtacggccttgatttcggatggggcaaagagttctacacgggaccaggcacgcatgactttgacggcgactcgctgatcttgccggatcaaaacgaagatggctcggtgattctcgcgacgtgtctacaggtggctcacatggaggccttcaagaaacacttttatgaagatatctaggccttatatgttttttatatacatgacgtatacaaatatttatgcactttcatttgaattctacttatattgtagtgattattgaattgtaataacagattct

SEQ ID NO: 32291 - protein, 460 aa, Arabidopsis thaliana
  misc_feature (1)..(460): Ceres Seq. ID no. 13592594
KRKRKGVCVMAPITFRKSYTIVPAEPTWSGRFPLAEWDQVGTITHIPTLYFYDKPSESFQGNVVEILKTSLSRVLVHFYPMAGRLRWLPRGRFELNCNAEGVEFIEAESEGKLSDFKDFSPTPEFENLMPQVNYKNPIETIPLFLAQVTKFKCGGISLSVNVSHAIVDGQSALHLISEWGRLARGEPLETVPFLDRKILWAGEPLPPFVSPPKFDHKEFDQPPFLIGETDNVEERKKKTIVVMLPLSTSQLQKLRSKANGSKHSDPAKGFTRYETVTGHVWRCACKARGHSPEQPTALGICIDTRSRMEPPLPRGYFGNATLDVVAASTSGELISNELGFAASLISKAIKNVTNEYVMIGIEYLKNQKDLKKFQDLHALGSTEGPFYGNPNLGVVSWLTLPMYGLDFGWGKEFYTGPGTHDFDGDSLILPDQNEDGSVILATCLQVAHMEAFKKHFYEDI

SEQ ID NO: 32292 - protein, 451 aa, Arabidopsis thaliana
  misc_feature (1)..(451): Ceres Seq. ID no. 13592595
MAPITFRKSYTIVPAEPTWSGRFPLAEWDQVGTITHIPTLYFYDKPSESFQGNVVEILKTSLSRVLVHFYPMAGRLRWLPRGRFELNCNAEGVEFIEAESEGKLSDFKDFSPTPEFENLMPQVNYKNPIETIPLFLAQVTKFKCGGISLSVNVSHAIVDGQSALHLISEWGRLARGEPLETVPFLDRKILWAGEPLPPFVSPPKFDHKEFDQPPFLIGETDNVEERKKKTIVVMLPLSTSQLQKLRSKANGSKHSDPAKGFTRYETVTGHVWRCACKARGHSPEQPTALGICIDTRSRMEPPLPRGYFGNATLDVVAASTSGELISNELGFAASLISKAIKNVTNEYVMIGIEYLKNQKDLKKFQDLHALGSTEGPFYGNPNLGVVSWLTLPMYGLDFGWGKEFYTGPGTHDFDGDSLILPDQNEDGSVILATCLQVAHMEAFKKHFYEDI

SEQ ID NO: 32293 - protein, 380 aa, Arabidopsis thaliana
  misc_feature (1)..(380): Ceres Seq. ID no. 13592596
MAGRLRWLPRGRFELNCNAEGVEFIEAESEGKLSDFKDFSPTPEFENLMPQVNYKNPIETIPLFLAQVTKFKCGGISLSVNVSHAIVDGQSALHLISEWGRLARGEPLETVPFLDRKILWAGEPLPPFVSPPKFDHKEFDQPPFLIGETDNVEERKKKTIVVMLPLSTSQLQKLRSKANGSKHSDPAKGFTRYETVTGHVWRCACKARGHSPEQPTALGICIDTRSRMEPPLPRGYFGNATLDVVAASTSGELISNELGFAASLISKAIKNVTNEYVMIGIEYLKNQKDLKKFQDLHALGSTEGPFYGNPNLGVVSWLTLPMYGLDFGWGKEFYTGPGTHDFDGDSLILPDQNEDGSVILATCLQVAHMEAFKKHFYEDI

SEQ ID NO: 32294 - DNA, 1084 bp, Arabidopsis thaliana
  misc_feature (1)..(1084): Ceres Seq. ID no. 13592597
aattctctttgaccaaaaaataatccaaagacttagaagaaaaacaagatcgggtctcgtcacggtccacggcgcagctttttcttcgtcttcttcaattattctattccctctgagagattctctctgcgtttcttagatcgagcgagggaagcgagagatcatggaaggtggagctgctctctacaatcctcgaactgtcgaagaagttttcaaggatttcaaaggtcgtcgtactgccattgtcaaagctctcaccaccgatgttcaagagttttaccaacaatgtgaccctgagaaggagaatctttgcttgtatgggttaccgaatgaagaatgggaagtgaatttaccagctgaagaagtgcctcctgagttaccagagccagctcttggtattaactttgctagggatgggctctctgaaaaggaatggctttcgcttgttgctattcacagtgacgcttggttactgtctgtctcgttttactttggctcaaggttttctttccacaaggaagagaggaagcgtttgttcaacatgatcaatgatgttcctactatatttgaagtagtgactggaatggctaaagcaaaggacaagtcatctgctgcaaatcaaaacggaaacaaatccaagtctaactctaaagttagaacttcagagggaaaaagctcaaagaccaagcagccaaaagaggaggacgaagaaatagatgaagatgatgaggatgaccacggggaaaccctttgtggagcctgtggagacagtgatggtgctgatgaattctggatctgctgtgacctttgtgagaagtggttccatggcaagtgtgtgaagatcactccagctagagctgagcatatcaaacaatacaagtgcccttcatgcagcaacaaaagagctcgagcttaaaaatgttgtattgtagagaatagcctgtagtgacaactctcactaccctcgatctgtctttatttggctagtcttttagctcgttattggccataacagcttgggcctatttctctgtataattggtttgattttgcaactgagaaaaaaaaggaaactctttaactg

SEQ ID NO: 32295 - protein, 250 aa, Arabidopsis thaliana
  misc_feature (1)..(250): Ceres Seq. ID no. 13592598
MEGGAALYNPRTVEEVFKDFKGRRTAIVKALTTDVQEFYQQCDPEKENLCLYGLPNEEWEVNLPAEEVPPELPEPALGINFARDGLSEKEWLSLVAIHSDAWLLSVSFYFGSRFSFHKEERKRLFNMINDVPTIFEVVTGMAKAKDKSSAANQNGNKSKSNSKVRTSEGKSSKTKQPKEEDEEIDEDDEDDHGETLCGACGDSDGADEFWICCDLCEKWFHGKCVKITPARAEHIKQYKCPSCSNKRARA

SEQ ID NO: 32296 - DNA, 1258 bp, Arabidopsis thaliana
  misc_feature (1)..(1258): Ceres Seq. ID no. 13592599
ggaaaagatttttcaagctctctctttctctcgaaggtaaatgcttctctgatttcaccatttttgcttactcgattcaaaagacatgtcgccggcagctacggagacggagcgatggtgcgttgttaccggcggtagaggattcgcggcgaggcatcttgttgaaatgctcgtacgctacgaaatgttttgcgtccgtatcgccgatttagctccggcgataatgcttgatcctcaggaagggaacggagttctcgacgaaggattaagatctggtcgtgttcaatatatctccgctgatcttcgagataaatctcaagtcgttaaagcttttcagggagcggaggtggtgtttcatatggcagctccagattcttctattaacaatcatcagcttcagtattcggtgaatgttcaagggacacaaaatgtgattgatgcttgtgttgatgttggagtaaagaggcttatttacactagctctcctagtgttgtgtttgatggtgttcatggtattttgaacggtactgaatcaatggcttacccaattaagcacaatgactcatattcagcaactaaagctgaaggagaagagttgatcatgaaggctaatggtagaaatggactactcacttgttgcatacgtccaagcagtatttttggtcccggtgatagattattggttccgtcgcttgttgctgctgctagggctgggaaatctaagtttattattggtgatgggaataatctctatgatttcacttacgttgagaatgttgctcatgcccatgtttgtgctgagcgtgctctagcttcaggaggagatgtttctacaaaagctgcaggacaggcatatttcattaccaacatggagccaattaaattttgggaatttatgtcacagctccttgatggacttggttacgagaggccaagcataaagatccctgcgtttatcatgatgccgattgcgcatctggttgaactgacatataaagtgttgggaccatatgggatgacagtaccacaactaacaccttcaagagttaggcttctctcatgcagcagaactttcgattccacgaaagcaaaggatcgactaggctatgctcctgtggtcccacttcaggaaggtatacggaggacgatagactcattctctcacctaacagctggaagtcaatccaaaagagagggcccatccaaggcttctaggattcttggaggcggaaagggtatgaccatatatttcaattag

SEQ ID NO: 32297 - protein, 390 aa, Arabidopsis thaliana
  misc_feature (1)..(390): Ceres Seq. ID no. 13592600
MSPAATETERWCVVTGGRGFAARHLVEMLVRYEMFCVRIADLAPAIMLDPQEGNGVLDEGLRSGRVQYISADLRDKSQVVKAFQGAEVVFHMAAPDSSINNHQLQYSVNVQGTQNVIDACVDVGVKRLIYTSSPSVVFDGVHGILNGTESMAYPIKHNDSYSATKAEGEELIMKANGRNGLLTCCIRPSSIFGPGDRLLVPSLVAAARAGKSKFIIGDGNNLYDFTYVENVAHAHVCAERALASGGDVSTKAAGQAYFITNMEPIKFWEFMSQLLDGLGYERPSIKIPAFIMMPIAHLVELTYKVLGPYGMTVPQLTPSRVRLLSCSRTFDSTKAKDRLGYAPVVPLQEGIRRTIDSFSHLTAGSQSKREGPSKASRILGGGKGMTIYFN

SEQ ID NO: 32298 - protein, 363 aa, Arabidopsis thaliana
  misc_feature (1)..(363): Ceres Seq. ID no. 13592601
MLVRYEMFCVRIADLAPAIMLDPQEGNGVLDEGLRSGRVQYISADLRDKSQVVKAFQGAEVVFHMAAPDSSINNHQLQYSVNVQGTQNVIDACVDVGVKRLIYTSSPSVVFDGVHGILNGTESMAYPIKHNDSYSATKAEGEELIMKANGRNGLLTCCIRPSSIFGPGDRLLVPSLVAAARAGKSKFIIGDGNNLYDFTYVENVAHAHVCAERALASGGDVSTKAAGQAYFITNMEPIKFWEFMSQLLDGLGYERPSIKIPAFIMMPIAHLVELTYKVLGPYGMTVPQLTPSRVRLLSCSRTFDSTKAKDRLGYAPVVPLQEGIRRTIDSFSHLTAGSQSKREGPSKASRILGGGKGMTIYFN

SEQ ID NO: 32299 - protein, 357 aa, Arabidopsis thaliana
  misc_feature (1)..(357): Ceres Seq. ID no. 13592602
MFCVRIADLAPAIMLDPQEGNGVLDEGLRSGRVQYISADLRDKSQVVKAFQGAEVVFHMAAPDSSINNHQLQYSVNVQGTQNVIDACVDVGVKRLIYTSSPSVVFDGVHGILNGTESMAYPIKHNDSYSATKAEGEELIMKANGRNGLLTCCIRPSSIFGPGDRLLVPSLVAAARAGKSKFIIGDGNNLYDFTYVENVAHAHVCAERALASGGDVSTKAAGQAYFITNMEPIKFWEFMSQLLDGLGYERPSIKIPAFIMMPIAHLVELTYKVLGPYGMTVPQLTPSRVRLLSCSRTFDSTKAKDRLGYAPVVPLQEGIRRTIDSFSHLTAGSQSKREGPSKASRILGGGKGMTIYFN

SEQ ID NO: 32300 - DNA, 1038 bp, Arabidopsis thaliana
  misc_feature (1)..(1038): Ceres Seq. ID no. 13592611
tcaagtgaagcagaatcaaagttgccacttagtccggaagactgtgattgtgattttgaatgaactcatggaacaagtttcctctagatcaagctctctcactgtcggagagcaattctgcgccgtctttatacctttctttgccattatcgatgtcctagtttcctccgtcggacaatgcttcgattgccgcagcacatcgcctcggacatgtcagcacgcggatctggaacgtcttgctcgtgaatctcaattttcagtcaatgaagttgaagctttgtatgagctattcaagaaattgagctgttcaattattgatgacggcttgattcacaaggaagagcttagactggcgctgttccaagctccatatggtgagaacctctttcttgatagggtttttgatttgttcgatgaaaagaagaatggggttattgagtttgaggaattcatccatgcactcagtgtctttcatccctatgcatcaatccaggagaagaccgattttgcatttaggctctatgatctaagacaaactggattcattgagcgagaagaggtgcaacaaatggtttctgctattctcttggaatctgatatgatgctatccgatgaacttctgaccatgattattgataaaacatttgctgatgcagattctgacaaagacggtaaaattagtaaggatgaatggaatgtctatgtgcataaacatcctagcttgttgaagaatatgactcttccttacctaaaggatgtgacgacagcattcccaagttttatattcaacactgaggttgaagactgaggcacaactgtccatgcaacaccggtcatcttttttctgcttggtcctgtaattcgagtgagattgtcatagcgcaagagcagaacgaggaaagaaggttttccttattttattttaagccaacgtagttgatgattattagctgtaagtaaaattgtcaagcactttgctttgttttgatgactttactgtaattgttccattgaaagtaatgaagcatttttcttttc

SEQ ID NO: 32301 - protein, 268 aa, Arabidopsis thaliana
  misc_feature (1)..(268): Ceres Seq. ID no. 13592612
QVKQNQSCHLVRKTVIVILNELMEQVSSRSSSLTVGEQFCAVFIPFFAIIDVLVSSVGQCFDCRSTSPRTCQHADLERLARESQFSVNEVEALYELFKKLSCSIIDDGLIHKEELRLALFQAPYGENLFLDRVFDLFDEKKNGVIEFEEFIHALSVFHPYASIQEKTDFAFRLYDLRQTGFIEREEVQQMVSAILLESDMMLSDELLTMIIDKTFADADSDKDGKISKDEWNVYVHKHPSLLKNMTLPYLKDVTTAFPSFIFNTEVED

SEQ ID NO: 32302 - protein, 246 aa, Arabidopsis thaliana
  misc_feature (1)..(246): Ceres Seq. ID no. 13592613
MEQVSSRSSSLTVGEQFCAVFIPFFAIIDVLVSSVGQCFDCRSTSPRTCQHADLERLARESQFSVNEVEALYELFKKLSCSIIDDGLIHKEELRLALFQAPYGENLFLDRVFDLFDEKKNGVIEFEEFIHALSVFHPYASIQEKTDFAFRLYDLRQTGFIEREEVQQMVSAILLESDMMLSDELLTMIIDKTFADADSDKDGKISKDEWNVYVHKHPSLLKNMTLPYLKDVTTAFPSFIFNTEVED

SEQ ID NO: 32303 - DNA, 830 bp, Arabidopsis thaliana
  misc_feature (1)..(830): Ceres Seq. ID no. 13592647
gaagaagtcgagagacaaagttaaaagtagagaagaaaatgagtgaggaggagaggaagcaacacgtcgttctagtacatggtgcttgccatggcgcctggtgctggtacaaggttaagccgcagctcgaggcttctggccaccgcgtaaccgccgtagatctagctgcctccggtatagacatgaccaggtcaatcacagatatatccacatgcgaacaatactcagagccattgatgcagctaatgacctcactaccagatgatgagaaggttgtgcttgttggtcatagcttaggaggtttgagtttagctatggccatggatatgtttccgaccaaaatctctgtttctgtctttgtgactgctatgatgccagacaccaaacactcaccatccttcgtatgggataagctaagaaaagaaacttcacgagaggaatggttagacaccgtgtttacgagcgagaaacctgattttcctagcgagttttggatttttggaccagaattcatggccaagaacttgtatcagttgtctccagtccaagatcttgaattggcgaaaatgttggtgagggcaaacccattgattaagaaagatatggcagagagaagaagcttcagtgaggaaggatacggatccgttacacgtatatttattgtatgcggaaaggatcttgtgtcacccgaagattaccagcgatcgatgatcagcaactttcccccaaaagaagtaatggagatcaaagacgcagatcatatgccaatgttctccaagcctcaacaactatgtgctcttctcttggagattgcaaataaatatgcctaa

SEQ ID NO: 32304 - protein, 275 aa, Arabidopsis thaliana
  misc_feature (1)..(275): Ceres Seq. ID no. 13592648
RSRETKLKVEKKMSEEERKQHVVLVHGACHGAWCWYKVKPQLEASGHRVTAVDLAASGIDMTRSITDISTCEQYSEPLMQLMTSLPDDEKVVLVGHSLGGLSLAMAMDMFPTKISVSVFVTAMMPDTKHSPSFVWDKLRKETSREEWLDTVFTSEKPDFPSEFWIFGPEFMAKNLYQLSPVQDLELAKMLVRANPLIKKDMAERRSFSEEGYGSVTRIFIVCGKDLVSPEDYQRSMISNFPPKEVMEIKDADHMPMFSKPQQLCALLLEIANKYA

SEQ ID NO: 32305 - protein, 263 aa, Arabidopsis thaliana
  misc_feature (1)..(263): Ceres Seq. ID no. 13592649
MSEEERKQHVVLVHGACHGAWCWYKVKPQLEASGHRVTAVDLAASGIDMTRSITDISTCEQYSEPLMQLMTSLPDDEKVVLVGHSLGGLSLAMAMDMFPTKISVSVFVTAMMPDTKHSPSFVWDKLRKETSREEWLDTVFTSEKPDFPSEFWIFGPEFMAKNLYQLSPVQDLELAKMLVRANPLIKKDMAERRSFSEEGYGSVTRIFIVCGKDLVSPEDYQRSMISNFPPKEVMEIKDADHMPMFSKPQQLCALLLEIANKYA

SEQ ID NO: 32306 - protein, 215 aa, Arabidopsis thaliana
  misc_feature (1)..(215): Ceres Seq. ID no. 13592650
MTRSITDISTCEQYSEPLMQLMTSLPDDEKVVLVGHSLGGLSLAMAMDMFPTKISVSVFVTAMMPDTKHSPSFVWDKLRKETSREEWLDTVFTSEKPDFPSEFWIFGPEFMAKNLYQLSPVQDLELAKMLVRANPLIKKDMAERRSFSEEGYGSVTRIFIVCGKDLVSPEDYQRSMISNFPPKEVMEIKDADHMPMFSKPQQLCALLLEIANKYA

SEQ ID NO: 32307 - DNA, 1581 bp, Arabidopsis thaliana
  misc_feature (1)..(1581): Ceres Seq. ID no. 13592659
aaaaaaaagcaaaatgaaactttactctctactttccgttttcttggtcatcctcttggcaacaagcgacagtgatgcctttaccagaaacaattttccaaaggatttcctctttggagccgccacttctgcttatcagtgggaaggagctgttgctgaagatggaagaactcctagcgtctgggatactttctcacacacttacaatagaggtaatttaggtaatggagatataacatccgatgggtatcacaaatacaaggaagatgttaagctgatggcagaaatgggcttagaatcattcagattctctatctcctggtcaagacttatacctaatggaaggggactcattaacccaaaaggtctactgttttacaagaacctcatcaaagaactaataagccatggaatcgaaccacatgttacactttaccactatgatcttcctcagtctcttgaagatgagtatggaggctggatcaaccgcaaaatcatagaagacttcactgcttatgcagatgtatgtttcagagagtttggggaggatgtgaagttatggactacaataaacgaagctacaattttcgccattggttcttatgaccaaggaatctcgccccctggacattgttctcctaacaaattcatcaattgtactagtggaaattcttctacagaaccatatcttgcaggccataacatattgctagctcatgcctctgcttcaaagttgtataaactaaagtacaagagtacgcagaaaggatccatagggcttagtatatttgcattcgggttatctccatatacaaactccaaggatgatgaaatcgcaactcaaagagctaaagctttcttctatggctggatgttgaagcctttggtatttggagactatccggatgaaatgaagagaactgttggatcgagattaccggtgttttcggaggaagagtcagagcaacttaaaggatcatctgactttataggaattattcactacacgacattttatgtcacaaacaaaccctcaccttctatctttcccagcatgaatgaaggcttctttaaagacatgggagtatatatgatttccgctgcgaattcttcatttcttctgtgggaggctactccatggggtcttgaaggtattcttgagtatataaagcagagctataacaatcctccaatctatattcttgaaaatggtatgccgatgggacgcgactcgacattacaagacacacaaagaattgaattcattcaagcttacattggtgctatgctcaatgccatcaagaatggatcggacacgagaggttactttgtatggtcgatgattgatttgtatgagttactgagtggatatacgaccagcttcggaatgtactatgtgaatttcagcgatcctggtcgcaagaggactccaaagctctctgcttcttggtacactggtttcctcaatggtacaattgatgttgctactcaagatactattcagttgcagagcaacatctctggctcttcttcattgtaatatatttaaccaaaggatccttatttggtttatttcatcta

SEQ ID NO: 32308 - protein, 512 aa, Arabidopsis thaliana
  misc_feature (1)..(512): Ceres Seq. ID no. 13592660
KKSKMKLYSLLSVFLVILLATSDSDAFTRNNFPKDFLFGAATSAYQWEGAVAEDGRTPSVWDTFSHTYNRGNLGNGDITSDGYHKYKEDVKLMAEMGLESFRFSISWSRLIPNGRGLINPKGLLFYKNLIKELISHGIEPHVTLYHYDLPQSLEDEYGGWINRKIIEDFTAYADVCFREFGEDVKLWTTINEATIFAIGSYDQGISPPGHCSPNKFINCTSGNSSTEPYLAGHNILLAHASASKLYKLKYKSTQKGSIGLSIFAFGLSPYTNSKDDEIATQRAKAFFYGWMLKPLVFGDYPDEMKRTVGSRLPVFSEEESEQLKGSSDFIGIIHYTTFYVTNKPSPSIFPSMNEGFFKDMGVYMISAANSSFLLWEATPWGLEGILEYIKQSYNNPPIYILENGMPMGRDSTLQDTQRIEFIQAYIGAMLNAIKNGSDTRGYFVWSMIDLYELLSGYTTSFGMYYVNFSDPGRKRTPKLSASWYTGFLNGTIDVATQDTIQLQSNISGSSSL

SEQ ID NO: 32309 - protein, 508 aa, Arabidopsis thaliana
  misc_feature (1)..(508): Ceres Seq. ID no. 13592661
MKLYSLLSVFLVILLATSDSDAFTRNNFPKDFLFGAATSAYQWEGAVAEDGRTPSVWDTFSHTYNRGNLGNGDITSDGYHKYKEDVKLMAEMGLESFRFSISWSRLIPNGRGLINPKGLLFYKNLIKELISHGIEPHVTLYHYDLPQSLEDEYGGWINRKIIEDFTAYADVCFREFGEDVKLWTTINEATIFAIGSYDQGISPPGHCSPNKFINCTSGNSSTEPYLAGHNILLAHASASKLYKLKYKSTQKGSIGLSIFAFGLSPYTNSKDDEIATQRAKAFFYGWMLKPLVFGDYPDEMKRTVGSRLPVFSEEESEQLKGSSDFIGIIHYTTFYVTNKPSPSIFPSMNEGFFKDMGVYMISAANSSFLLWEATPWGLEGILEYIKQSYNNPPIYILENGMPMGRDSTLQDTQRIEFIQAYIGAMLNAIKNGSDTRGYFVWSMIDLYELLSGYTTSFGMYYVNFSDPGRKRTPKLSASWYTGFLNGTIDVATQDTIQLQSNISGSSSL

SEQ ID NO: 32310 - protein, 420 aa, Arabidopsis thaliana
  misc_feature (1)..(420): Ceres Seq. ID no. 13592662
MAEMGLESFRFSISWSRLIPNGRGLINPKGLLFYKNLIKELISHGIEPHVTLYHYDLPQSLEDEYGGWINRKIIEDFTAYADVCFREFGEDVKLWTTINEATIFAIGSYDQGISPPGHCSPNKFINCTSGNSSTEPYLAGHNILLAHASASKLYKLKYKSTQKGSIGLSIFAFGLSPYTNSKDDEIATQRAKAFFYGWMLKPLVFGDYPDEMKRTVGSRLPVFSEEESEQLKGSSDFIGIIHYTTFYVTNKPSPSIFPSMNEGFFKDMGVYMISAANSSFLLWEATPWGLEGILEYIKQSYNNPPIYILENGMPMGRDSTLQDTQRIEFIQAYIGAMLNAIKNGSDTRGYFVWSMIDLYELLSGYTTSFGMYYVNFSDPGRKRTPKLSASWYTGFLNGTIDVATQDTIQLQSNISGSSSL

SEQ ID NO: 32311 - DNA, 1439 bp, Arabidopsis thaliana
  misc_feature (1)..(1439): Ceres Seq. ID no. 13592666
gatatttcaaaaagttagctggttcttcgtcataaatttctccagttttgtcaaaaacgaagaccacagcgagccctaaatcttgtcgggcgttgaatcttacaaatttgcaagtgattctcgtcatacctgtatcttcttcttcttcttcgttcttcttctggatttgattggtggacaaaggtagctgaatcagcttcagaattgaatttgatctttgtttgagacaagaagcattggtgtttggagcatttctgaggagttatgggatatctgaattctgttttgtcatcttcgagccaggttcactccgacgatggacctgttagcggtggtggcctcagtcagaacgggaagttcagctatggatatgcaagctctcccggtaaaagatcttctatggaggacttctatgaaactaggatcgacggcgttgaaggggaaatagttggtctatttggagtctttgatggacatggaggtgcacgtgcagctgaatatgtgaagcaaaatctcttcagtaacctgatcaggcatccaaagttcatctctgataccacagctgcaatagctgatgcatacaaccaaacagactcagagtttcttaaatcagaaaatagtcagaacagagatgctggttcaacggcgtcaacagccatcttagttggtgaccgtttacttgttgcaaatgtaggggactctagagctgtaatatgcagaggtggcaatgctattgctgtatcccgagatcacaagcctgatcaaagtgacgagcgccaaagaattgaggatgcaggaggatttgtcatgtgggctggaacatggagagttggaggagttcttgctgtttctcgtgcatttggcgataggttgttgaagcagtatgttgttgctgatccggagatacaggaggaaaaagttgatagctctctcgagtttctcattcttgcaagtgatggtctctgggacgttgtatctaacgaggaagccgtaggcatgatcaaggcgatagaagatcccgaggaaggtgcaaagagactgatgatggaagcttaccaaagaggaagtgcagacaacataacttgtgtcgtcgtacgtttcttttcagaccaagcaggaggaataggttccagcagcaccaatatcccaatagatcatggtatcgtacctgaccgaatctccggtgactcatcaacctagttctaacattggtaacatccttttcgggtttcgtgatctcaaaacaagtgaatctgggagattatatattgttataaaaaggtgaaaggttttcaagaatatacaaacaaaactctcacacgaacgttttttgctgtgtcgtgtatcttttgttgttgttatacatttgttacttgggtatgtagctatagagagaataaatgtattagtacaagttctgattcattctacattgtgtc

SEQ ID NO: 32312 - protein, 311 aa, Arabidopsis thaliana
  misc_feature (1)..(311): Ceres Seq. ID no. 13592667
MGYLNSVLSSSSQVHSDDGPVSGGGLSQNGKFSYGYASSPGKRSSMEDFYETRIDGVEGEIVGLFGVFDGHGGARAAEYVKQNLFSNLIRHPKFISDTTAAIADAYNQTDSEFLKSENSQNRDAGSTASTAILVGDRLLVANVGDSRAVICRGGNAIAVSRDHKPDQSDERQRIEDAGGFVMWAGTWRVGGVLAVSRAFGDRLLKQYVVADPEIQEEKVDSSLEFLILASDGLWDVVSNEEAVGMIKAIEDPEEGAKRLMMEAYQRGSADNITCVVVRFFSDQAGGIGSSSTNIPIDHGIVPDRISGDSST

SEQ ID NO: 32313 - protein, 266 aa, Arabidopsis thaliana
  misc_feature (1)..(266): Ceres Seq. ID no. 13592668
MEDFYETRIDGVEGEIVGLFGVFDGHGGARAAEYVKQNLFSNLIRHPKFISDTTAAIADAYNQTDSEFLKSENSQNRDAGSTASTAILVGDRLLVANVGDSRAVICRGGNAIAVSRDHKPDQSDERQRIEDAGGFVMWAGTWRVGGVLAVSRAFGDRLLKQYVVADPEIQEEKVDSSLEFLILASDGLWDVVSNEEAVGMIKAIEDPEEGAKRLMMEAYQRGSADNITCVVVRFFSDQAGGIGSSSTNIPIDHGIVPDRISGDSST

SEQ ID NO: 32314 - DNA, 1516 bp, Arabidopsis thaliana
  misc_feature (1)..(1516): Ceres Seq. ID no. 13592681
actactctcttcttcacctcctcaagtcacagtgaccaaaatcacacacttcacaagaaacaacctatggatccaaatgaatctccaccaaaccaatttcgccacgtggtggccatgccttatccaggtcgaggacacatcaaccctatgatgaacctctgcaaacgccttgtccgtcgataccctaaccttcacgtcaccttcgtcgtcacagaagaatggctcgggtttattggacccgacccgaaacccgaccggatccatttctccactctccctaatctcatcccttccgagcttgtcagggccaaagacttcataggcttcattgatgccgtctacacaagattggaagaaccattcgagaagcttcttgacagcctcaattcaccacctccgagtgtaatattcgccgacacttacgtcatttgggctgtgcgagtcggcagaaaaaggaatattccggtggtttctctctggaccatgtcagccacgattctctccttcttcctccactctgatctactcataagtcatggccatgctctgttcgaaccatcagaagaagaggttgttgattacgtccccggtttatctccgacgaaactccgagatttgccgccgatatttgacggttacagcgaccgagtcttcaagacagctaagttgtgtttcgatgaactaccaggagctaggtctttactcttcaccaccgcctatgagcttgaacacaaagctattgacgctttcacctccaagctcgatatcccggtctacgctattggtcctttaataccttttgaagaactttctgttcaaaatgataacaaggaacctaattacatccagtggcttgaggaacaaccggaaggctctgttctttacatatctcagggaagttttctttcggtctcggaagctcagatggaggaaatagtgaaaggactgagagaaagtggagtccggtttctttgggtggctcgtgggggcgagttaaagcttaaggaggctcttgaaggtagcttaggtgtagtggtgagctggtgtgatcagcttcgggtgctgtgtcacaaagctgtaggcgggttttggactcattgcgggtttaactcgacattggaagggatatattcaggagtaccaatgctagcgtttccgttgttttgggatcagattctgaacgctaagatgattgttgaggactggagagtcggaatgaggatcgagaggacgaaaaagaatgagttgttgatagggagagaggagatcaaggaagtagtgaagaggtttatggatagagagagtgaagaagggaaagagatgagaagaagggcttgtgaccttagtgaaatcagtcgaggagctgttgcgaaaagcggttcgtctaatgtaaacatcgatgagttcgttcggcatattaccaatacaaattaaggctcaaagaggttttattgtttcaatacaatgtaaggctcaatggcatgctcactaaatcatatgtatcttttgaatgact

SEQ ID NO: 32315 - protein, 477 aa, Arabidopsis thaliana
  misc_feature (1)..(477): Ceres Seq. ID no. 15221125
TTLFFTSSSHSDQNHTLHKKQPMDPNESPPNQFRHVVAMPYPGRGHINPMMNLCKRLVRRYPNLHVTFVVTEEWLGFIGPDPKPDRIHFSTLPNLIPSELVRAKDFIGFIDAVYTRLEEPFEKLLDSLNSPPPSVIFADTYVIWAVRVGRKRNIPVVSLWTMSATILSFFLHSDLLISHGHALFEPSEEEVVDYVPGLSPTKLRDLPPIFDGYSDRVFKTAKLCFDELPGARSLLFTTAYELEHKAIDAFTSKLDIPVYAIGPLIPFEELSVQNDNKEPNYIQWLEEQPEGSVLYISQGSFLSVSEAQMEEIVKGLRESGVRFLWVARGGELKLKEALEGSLGVVVSWCDQLRVLCHKAVGGFWTHCGFNSTLEGIYSGVPMLAFPLFWDQILNAKMIVEDWRVGMRIERTKKNELLIGREEIKEVVKRFMDRESEEGKEMRRRACDLSEISRGAVAKSGSSNVNIDEFVRHITNTN

SEQ ID NO: 32316 - protein, 455 aa, Arabidopsis thaliana
  misc_feature (1)..(455): Ceres Seq. ID no. 15221126
MDPNESPPNQFRHVVAMPYPGRGHINPMMNLCKRLVRRYPNLHVTFVVTEEWLGFIGPDPKPDRIHFSTLPNLIPSELVRAKDFIGFIDAVYTRLEEPFEKLLDSLNSPPPSVIFADTYVIWAVRVGRKRNIPVVSLWTMSATILSFFLHSDLLISHGHALFEPSEEEVVDYVPGLSPTKLRDLPPIFDGYSDRVFKTAKLCFDELPGARSLLFTTAYELEHKAIDAFTSKLDIPVYAIGPLIPFEELSVQNDNKEPNYIQWLEEQPEGSVLYISQGSFLSVSEAQMEEIVKGLRESGVRFLWVARGGELKLKEALEGSLGVVVSWCDQLRVLCHKAVGGFWTHCGFNSTLEGIYSGVPMLAFPLFWDQILNAKMIVEDWRVGMRIERTKKNELLIGREEIKEVVKRFMDRESEEGKEMRRRACDLSEISRGAVAKSGSSNVNIDEFVRHITNTN

SEQ ID NO: 32317 - protein, 439 aa, Arabidopsis thaliana
  misc_feature (1)..(439): Ceres Seq. ID no. 15221127
MPYPGRGHINPMMNLCKRLVRRYPNLHVTFVVTEEWLGFIGPDPKPDRIHFSTLPNLIPSELVRAKDFIGFIDAVYTRLEEPFEKLLDSLNSPPPSVIFADTYVIWAVRVGRKRNIPVVSLWTMSATILSFFLHSDLLISHGHALFEPSEEEVVDYVPGLSPTKLRDLPPIFDGYSDRVFKTAKLCFDELPGARSLLFTTAYELEHKAIDAFTSKLDIPVYAIGPLIPFEELSVQNDNKEPNYIQWLEEQPEGSVLYISQGSFLSVSEAQMEEIVKGLRESGVRFLWVARGGELKLKEALEGSLGVVVSWCDQLRVLCHKAVGGFWTHCGFNSTLEGIYSGVPMLAFPLFWDQILNAKMIVEDWRVGMRIERTKKNELLIGREEIKEVVKRFMDRESEEGKEMRRRACDLSEISRGAVAKSGSSNVNIDEFVRHITNTN

SEQ ID NO: 32318 - DNA, 1881 bp, Arabidopsis thaliana
  misc_feature (1)..(1881): Ceres Seq. ID no. 13592686
gaagagagagagatatagagacactgaaagcaaagaccaaaaaagaaaaattaaaaagagagagaggaaaatggagagcgacgaagcagcagcagtgtctcctcaagcaacgacaccgagcggaggaaccggagcttctgggccgaagaagagaggtcggaaacctaaaaccaaggaagattctcagacgccgtcgtctcagcaacagagcgatgttaaaatgaaagaaagtgggaagaaaacgcagcagtcgccgagtgttgacgagaagtactctcagtggaaaggtctcgtccccattctctacgactggctcgctaaccataacctcgtctggccttcactctcttgcagatggggtccgcagcttgagcaagcaacctacaagaatcgccagcgtctgtacctctcagagcaaactgatggaagtgtgcccaatactttggtcatagcaaattgtgaagttgttaagccaagggttgctgcagcagagcacatttctcagttcaatgaagaagcacgttctccatttgtgaagaagtacaagaccatcattcaccctggagaggttaacagaatcagggaactcccacagaatagtaagattgttgctactcacaccgacagtcctgatgttctcatttgggatgttgaaacccaaccaaaccgtcatgctgtgcttggagctgcaaattcccgtccagatttgatactaactgggcaccaagataatgctgaatttgctcttgccatgtgcccaacggaaccctttgtgctctccggaggcaaggacaagtcagttgttttgtggagtatccaagatcacatcacaacgattgggacagattccaaatcatctggatctatcatcaaacagactggtgaaggtactgataagaatgagagtcctactgttggcccacgaggtgtatatcatggccatgaagatacagttgaagatgtggcattcagcccgacgagtgcacaagaattctgcagtgttggtgatgattcttgccttatactatgggatgcgagaactggcacaaaccctgtcacgaaggttgaaaaagcgcatgatgctgatcttcattgtgttgattggaatcctcatgacgacaatctgatcctgacagggtcagcagacaacactgtccggttgtttgatcgtaggaagcttaccgctaatggagttggttcgcctatttacaaatttgagggacacaaagctgctgttctttgtgttcagtggtctcctgataagtcatccgtctttgggagctctgcagaagatggtctcttgaacatctgggattatgacagggtcagtaagaagtctgatcgtgcagctaaaagccccgctgggctcttcttccagcatgctggtcacagggacaaagttgttgatttccactggaatgcttcagacccttggactattgtcagtgtttctgatgactgtgagactactggtggaggtggaacattgcagatatggcggatgagtgacttgatttacagaccagaagaagaagtcgtggcagaattggagaagttcaagtcgcatgttatgacttgtgcctccaagccttaagagtaaagaaaacccattgtctatctatctatcgcctatggtaaactaatgcgggttttagcgaggagtcttggtttttgtaaggctggtttgtcttttgagatattggtggtagcttttaggacctttccatatcagttaggggtacatggttctggttcatgatcctgtttcatcagactcttaggtgctgttttgttcaactgagatgttaatcaaatcggaccaactttatgtgttttggtttaaggtttcaatacttggcctgaacctaatgattccttctc

SEQ ID NO: 32319 - protein, 530 aa, Arabidopsis thaliana
  misc_feature (1)..(530): Ceres Seq. ID no. 13592687
KRERYRDTESKDQKRKIKKRERKMESDEAAAVSPQATTPSGGTGASGPKKRGRKPKTKEDSQTPSSQQQSDVKMKESGKKTQQSPSVDEKYSQWKGLVPILYDWLANHNLVWPSLSCRWGPQLEQATYKNRQRLYLSEQTDGSVPNTLVIANCEVVKPRVAAAEHISQFNEEARSPFVKKYKTIIHPGEVNRIRELPQNSKIVATHTDSPDVLIWDVETQPNRHAVLGAANSRPDLILTGHQDNAEFALAMCPTEPFVLSGGKDKSVVLWSIQDHITTIGTDSKSSGSIIKQTGEGTDKNESPTVGPRGVYHGHEDTVEDVAFSPTSAQEFCSVGDDSCLILWDARTGTNPVTKVEKAHDADLHCVDWNPHDDNLILTGSADNTVRLFDRRKLTANGVGSPIYKFEGHKAAVLCVQWSPDKSSVFGSSAEDGLLNIWDYDRVSKKSDRAAKSPAGLFFQHAGHRDKVVDFHWNASDPWTIVSVSDDCETTGGGGTLQIWRMSDLIYRPEEEVVAELEKFKSHVMTCASKP

SEQ ID NO: 32320 - protein, 507 aa, Arabidopsis thaliana
  misc_feature (1)..(507): Ceres Seq. ID no. 13592688
MESDEAAAVSPQATTPSGGTGASGPKKRGRKPKTKEDSQTPSSQQQSDVKMKESGKKTQQSPSVDEKYSQWKGLVPILYDWLANHNLVWPSLSCRWGPQLEQATYKNRQRLYLSEQTDGSVPNTLVIANCEVVKPRVAAAEHISQFNEEARSPFVKKYKTIIHPGEVNRIRELPQNSKIVATHTDSPDVLIWDVETQPNRHAVLGAANSRPDLILTGHQDNAEFALAMCPTEPFVLSGGKDKSVVLWSIQDHITTIGTDSKSSGSIIKQTGEGTDKNESPTVGPRGVYHGHEDTVEDVAFSPTSAQEFCSVGDDSCLILWDARTGTNPVTKVEKAHDADLHCVDWNPHDDNLILTGSADNTVRLFDRRKLTANGVGSPIYKFEGHKAAVLCVQWSPDKSSVFGSSAEDGLLNIWDYDRVSKKSDRAAKSPAGLFFQHAGHRDKVVDFHWNASDPWTIVSVSDDCETTGGGGTLQIWRMSDLIYRPEEEVVAELEKFKSHVMTCASKP

SEQ ID NO: 32321 - protein, 457 aa, Arabidopsis thaliana
  misc_feature (1)..(457): Ceres Seq. ID no. 13592689
MKESGKKTQQSPSVDEKYSQWKGLVPILYDWLANHNLVWPSLSCRWGPQLEQATYKNRQRLYLSEQTDGSVPNTLVIANCEVVKPRVAAAEHISQFNEEARSPFVKKYKTIIHPGEVNRIRELPQNSKIVATHTDSPDVLIWDVETQPNRHAVLGAANSRPDLILTGHQDNAEFALAMCPTEPFVLSGGKDKSVVLWSIQDHITTIGTDSKSSGSIIKQTGEGTDKNESPTVGPRGVYHGHEDTVEDVAFSPTSAQEFCSVGDDSCLILWDARTGTNPVTKVEKAHDADLHCVDWNPHDDNLILTGSADNTVRLFDRRKLTANGVGSPIYKFEGHKAAVLCVQWSPDKSSVFGSSAEDGLLNIWDYDRVSKKSDRAAKSPAGLFFQHAGHRDKVVDFHWNASDPWTIVSVSDDCETTGGGGTLQIWRMSDLIYRPEEEVVAELEKFKSHVMTCASKP

SEQ ID NO: 32322 - DNA, 3304 bp, Arabidopsis thaliana
  misc_feature (1)..(3304): Ceres Seq. ID no. 13592702
atcaatggagtcttcactcttttctccatcttcctcttcttactcttctctcttcactgcaaaacctacgcgtcttttatcaccaaaacccaaattcacattctccatcagatcctccattgagaaacccaaacccaaactcgagaccaattcatcgaaatcccaatcatgggtcagtcccgattggctcacaacactcactcgtaccctttcctcaggaaaaaacgacgagtcaggtataccaatcgcgaacgcgaagctcgacgatgtcgctgatctcctcggaggtgctctcttcttacctctctacaaatggatgaatgagtacggacccatttaccgtctcgctgctggtcctcgtaatttcgtaattgtgagcgacccagcgatagctaaacatgttttgaggaattatccaaagtacgctaaaggcttagtcgctgaagtctctgaatttctatttggttcgggtttcgctatcgctgaaggacctctttggacagcgaggcgtagagcggtggttccatcgcttcacaggaggtatttgtctgtgattgtggagagagtattctgcaaatgtgcagagaggcttgttgagaagttgcagccttatgcagaagacggaagtgctgtgaatatggaagcgaagttctctcagatgacacttgatgtcattgggttgtctctttttaactacaatttcgattctttgactactgatagtcctgtcattgaagctgtttacactgctcttaaagaagctgagcttcgttctactgatcttctgccatattggaagatcgatgcattgtgtaagatagtcccgagacaggtgaaagctgaaaaggctgtaactttgataagggaaactgttgaagaccttattgctaagtgtaaagaaattgtcgaaagagaaggcgaaagaatcaatgatgaggagtatgtaaatgatgctgacccaagtatcctgcgtttcttgcttgcaagcagagaagaggtatcaagtgtgcagttacgggatgatcttctctcaatgctcgtagcgggtcatgaaaccactggatctgtcctcacttggacactttatctcctaagtaagaactcatctgcattaaggaaagcacaagaagaagtagacagagtgttagaaggaagaaacccggctttcgaggatataaaggagttgaagtacatcactcgttgtataaacgagtcaatgcgtctctatcctcatcctcctgtcttgataagaagagctcaagttcctgacattcttcctgggaactataaggtcaataccggacaagacattatgatttcagtctataacatccatcgttcttccgaggtatgggaaaaagctgaggaatttctgcctgaacgattcgacatagatggcgcaatccctaacgaaacaaacactgatttcaaattcatcccattcagtggagggcctagaaaatgtgtaggcgatcagtttgcattgatggaggcaattgtggcactcgcggtgtttcttcagcggttaaacgttgagctggttcctgatcagaccattagcatgaccacaggagcaaccatacacaccaccaatggattgtatatgaaggtgagccaaaggtaaaaaccagaatttatgttttcatgataattgattggtgtgaatggacttgtttcatagtactcttgagaaataaccacaaaaaaatgaattatggaaaatagttgtaccatcggaaatgtgaattttgaacagtgagatgctagtaccattaaagtttggtaattgtgttatcatttcaaatcaaactttcatacagcttgtgtttgttctccatttttcagtaattacgaaaatcaaaattttatttttttttgaatttctaaataatagactaaggtctaaaaccatcccattccatatggaccacacgtaacattaaccttaaaaaccatataaaaccatataaaaccaatactagtgggttctatagcgatgtgtagtttcactttcacgtacgaggaagattaaaaaaaatggagaacgaaagctcagagagtagaaacagagctcgtcttgccattatggagcttgctaacatgattagcgttcccatgtctctcaatgccgccgtgcgactaggcattgccgacgccatttggaacggcggagccaattctcctctctctgccgccgagatcctccctcgcctccacctaccatctcacactaccattggtggcgaccccgagaatcttcagcgtatacttcggatgctcaccagctacggtgtcttctccgaacaccttgttggatccattgagaggaaatactctcttacggacgtcggaaaaactcttgtaaccgactccggcggcctctcttacgctgcctacgtcctccaacatcaccaggaggcgttgatgcgagcatggccactagttcacacggcagtggtggagccggagacagagccgtacgtgaaagcaaacggcgaggcggcatacgctcagtatgggaaaagtgaggagatgaatggtctaatgcaaaaggcaatgtctggcgtatctgtaccgttcatgaaagctatattagacggctacgatgggtttaaatcagtggatattttggttgacgtaggaggtagtgcaggggattgtctgcgtatgatccttcaacaatttcctaacgtccgtgaagggattaatttcgatttacctgaagttgttgccaaagcccccaatattcctggagtgactcacgtgggtggggatatgttccaatcagttcctagcgctgacgctatcttcatgaagtgggtgttaacgacatggacggatgaagaatgcaagcagataatgaagaattgctacaacgcgttaccagttggaggaaagctgattgcgtgtgagccggtcttgcctaaggaaaccgatgaaagtcaccggactcgtgccttgttagaaggtgacatctttgtcatgaccatctatagaaccaaaggtaagcatagaaccgaagaagagtttatagagcttggtctctccgcgggattccctacttttcgacctttctacattgattacttctacaccatcttagagtttcagaagtaatattcaagcatttttcttctcatatttctaaaagcttcaaaataatgaatcaaaagacctctttgttaattgagttgagatatctagtgaagacattaatattttcatcaagatgtaataatctaaagtctatattctaagtgcatccttaaaaggcattttccatatatataagtttcatctttcg

SEQ ID NO: 32323 - protein, 540 aa, Arabidopsis thaliana
  misc_feature (1)..(540): Ceres Seq. ID no. 13592703
SMESSLFSPSSSSYSSLFTAKPTRLLSPKPKFTFSIRSSIEKPKPKLETNSSKSQSWVSPDWLTTLTRTLSSGKNDESGIPIANAKLDDVADLLGGALFLPLYKWMNEYGPIYRLAAGPRNFVIVSDPAIAKHVLRNYPKYAKGLVAEVSEFLFGSGFAIAEGPLWTARRRAVVPSLHRRYLSVIVERVFCKCAERLVEKLQPYAEDGSAVNMEAKFSQMTLDVIGLSLFNYNFDSLTTDSPVIEAVYTALKEAELRSTDLLPYWKIDALCKIVPRQVKAEKAVTLIRETVEDLIAKCKEIVEREGERINDEEYVNDADPSILRFLLASREEVSSVQLRDDLLSMLVAGHETTGSVLTWTLYLLSKNSSALRKAQEEVDRVLEGRNPAFEDIKELKYITRCINESMRLYPHPPVLIRRAQVPDILPGNYKVNTGQDIMISVYNIHRSSEVWEKAEEFLPERFDIDGAIPNETNTDFKFIPFSGGPRKCVGDQFALMEAIVALAVFLQRLNVELVPDQTISMTTGATIHTTNGLYMKVSQR

SEQ ID NO: 32324 - protein, 539 aa, Arabidopsis thaliana
  misc_feature (1)..(539): Ceres Seq. ID no. 13592704
MESSLFSPSSSSYSSLFTAKPTRLLSPKPKFTFSIRSSIEKPKPKLETNSSKSQSWVSPDWLTTLTRTLSSGKNDESGIPIANAKLDDVADLLGGALFLPLYKWMNEYGPIYRLAAGPRNFVIVSDPAIAKHVLRNYPKYAKGLVAEVSEFLFGSGFAIAEGPLWTARRRAVVPSLHRRYLSVIVERVFCKCAERLVEKLQPYAEDGSAVNMEAKFSQMTLDVIGLSLFNYNFDSLTTDSPVIEAVYTALKEAELRSTDLLPYWKIDALCKIVPRQVKAEKAVTLIRETVEDLIAKCKEIVEREGERINDEEYVNDADPSILRFLLASREEVSSVQLRDDLLSMLVAGHETTGSVLTWTLYLLSKNSSALRKAQEEVDRVLEGRNPAFEDIKELKYITRCINESMRLYPHPPVLIRRAQVPDILPGNYKVNTGQDIMISVYNIHRSSEVWEKAEEFLPERFDIDGAIPNETNTDFKFIPFSGGPRKCVGDQFALMEAIVALAVFLQRLNVELVPDQTISMTTGATIHTTNGLYMKVSQR

SEQ ID NO: 32325 - protein, 435 aa, Arabidopsis thaliana
  misc_feature (1)..(435): Ceres Seq. ID no. 13592705
MNEYGPIYRLAAGPRNFVIVSDPAIAKHVLRNYPKYAKGLVAEVSEFLFGSGFAIAEGPLWTARRRAVVPSLHRRYLSVIVERVFCKCAERLVEKLQPYAEDGSAVNMEAKFSQMTLDVIGLSLFNYNFDSLTTDSPVIEAVYTALKEAELRSTDLLPYWKIDALCKIVPRQVKAEKAVTLIRETVEDLIAKCKEIVEREGERINDEEYVNDADPSILRFLLASREEVSSVQLRDDLLSMLVAGHETTGSVLTWTLYLLSKNSSALRKAQEEVDRVLEGRNPAFEDIKELKYITRCINESMRLYPHPPVLIRRAQVPDILPGNYKVNTGQDIMISVYNIHRSSEVWEKAEEFLPERFDIDGAIPNETNTDFKFIPFSGGPRKCVGDQFALMEAIVALAVFLQRLNVELVPDQTISMTTGATIHTTNGLYMKVSQR

SEQ ID NO: 32326 - DNA, 1460 bp, Arabidopsis thaliana
  misc_feature (1)..(1460): Ceres Seq. ID no. 13592742
ctctttgctctcactatcaaaactctgaatttcgatttcaatggagtcacgcgtgctgttacgcgccaccgcgaatgtcgttggaattccgaaattgagacgaccaatcggagcgatccaccgtcaattcagcactgcatcgtcttcctcgttctcggttaaaccaatcggaggaatcggagagggagcgaatctgatctccggtcgtcagcttcgtccaattcttcttctcgattcgtcggcgatcaacggaggagagaaaagagagattctcaaaccggttaaagccgccgctgctgaaggtggagataccgctggggaagctaaagttggattcctcgccaagtatccatggctagtcactggattcttcttcttcatgtggtacttcttaaatgtgattttcaacatccttaacaagaagatctataattacttcccttatccctattttgtatcggtgatacacttgttcgtgggagttgtttactgcttgatcagctggtccgtgggtcttcctaaacgtgccccgattgactcgaacctcctcaaggtattgataccagtcgcagtctgtcacgccttaggccatgtcactagcaatgtctctttcgctgcggttgctgtctccttcactcacaccatcaaagcacttgagccattcttcaatgcggctgcttctcaattcattatgggacaatccatccccataacactatggttgtctctagctcctgttgttcttggtgttgcaatggcttcactaactgagctatcattcaactggctcggtttcatcagtgctatgatatcaaacatttctttcacttaccgaagcatcttctccaagaaagccatgactgatatggacagtacaaatgtctacgcttacatctccatcatcgcactcttcgtctgcattcctcctgccatcatcgttgaaggtcctaaactacttaaccatggtttcgccgacgcgattgctaaagttggaatgactaaattcatctctgatctcttctgggttggaatgttttaccatctctacaatcagctggctaccaataccttggagagggttgcaccgctgactcacgcggttggaaacgttctgaaacgtgtgttcgtgatcggtttctccatcgttatcttcggaaacaagatatcgacacagacaggtataggaacaggaatagccattgctggagttgcaatgtactctatcattaaggccaagatcgaagaagagaaacggcaaggaaagaaagcatagaaagcagctgaagacggcggtcgacagttgcataaacaagttctccgatggatatatatatctatataataaataaccaaatgcaatagtatgttgtattgtaccatcaaccattgttttcgagtttttcctttctttgttttttttttgctttctgaaaagttatatataaattttttattctgcc

SEQ ID NO: 32327 - protein, 410 aa, Arabidopsis thaliana
  misc_feature (1)..(410): Ceres Seq. ID no. 13592743
MESRVLLRATANVVGIPKLRRPIGAIHRQFSTASSSSFSVKPIGGIGEGANLISGRQLRPILLLDSSAINGGEKREILKPVKAAAAEGGDTAGEAKVGFLAKYPWLVTGFFFFMWYFLNVIFNILNKKIYNYFPYPYFVSVIHLFVGVVYCLISWSVGLPKRAPIDSNLLKVLIPVAVCHALGHVTSNVSFAAVAVSFTHTIKALEPFFNAAASQFIMGQSIPITLWLSLAPVVLGVAMASLTELSFNWLGFISAMISNISFTYRSIFSKKAMTDMDSTNVYAYISIIALFVCIPPAIIVEGPKLLNHGFADAIAKVGMTKFISDLFWVGMFYHLYNQLATNTLERVAPLTHAVGNVLKRVFVIGFSIVIFGNKISTQTGIGTGIAIAGVAMYSIIKAKIEEEKRQGKKA

SEQ ID NO: 32328 - protein, 297 aa, Arabidopsis thaliana
  misc_feature (1)..(297): Ceres Seq. ID no. 13592744
MWYFLNVIFNILNKKIYNYFPYPYFVSVIHLFVGVVYCLISWSVGLPKRAPIDSNLLKVLIPVAVCHALGHVTSNVSFAAVAVSFTHTIKALEPFFNAAASQFIMGQSIPITLWLSLAPVVLGVAMASLTELSFNWLGFISAMISNISFTYRSIFSKKAMTDMDSTNVYAYISIIALFVCIPPAIIVEGPKLLNHGFADAIAKVGMTKFISDLFWVGMFYHLYNQLATNTLERVAPLTHAVGNVLKRVFVIGFSIVIFGNKISTQTGIGTGIAIAGVAMYSIIKAKIEEEKRQGKKA

SEQ ID NO: 32329 - DNA, 931 bp, Arabidopsis thaliana
  misc_feature (1)..(931): Ceres Seq. ID no. 13592746
tgatccccaaaaaaggtttctcattagatcggtatcgatggctgctgccgctaatacctccgccgttttcgcctctccgtcgcagcctttatcctcgaaacgtagttttttgtacagttcaaggattggtccaatactaaggagatttccgaggaagaaacttgatctccaagttaaagctgttgccacgactcttgcacctctcgaagagatcaaagaatacaagcttccttcatgggccatgttcgagatgggtactgctcctgtgtactggaaaaccatgaatggtcttccaccaacctcaggtgaaaagttgaaacttttctataatccagctgcaagcaaactcactcttaacgaagactatggggttgctttcaacggaggatttaaccaaccaatcatgtgtggtggggagccaagagcaatgcttaagaaagatcgaggcaaagccgattctccgatatacactatgcagatttgcattcctaagcatgctgtgaatttgatattctcattcactaatggtgtcgattgggacggtccatacagacttcagtttcaagtccccaagcgatggcaaaacaaacctattgagttcttcaatgagggtctagcgaacgagttgagccaagatggagcctgcgaaagagcaatatttcctgactcgaacgttgttccaactcgttgcacgatgatcgccaacttgacggtcgaaggaggagatagatgcaacttggatctagttcctggatgcatggatacaaattcagaacatttcaacccatatgctaatgttgatgatggctcttgtcccctcgagttatccgattctgatgaatagaactaatttttatttatgtaaatatatacacatatgttaatatcagtatttgaatacaataaaaatgttacttgttgattttaatcc

SEQ ID NO: 32330 - protein, 280 aa, Arabidopsis thaliana
  misc_feature (1)..(280): Ceres Seq. ID no. 15221135
DPQKRFLIRSVSMAAAANTSAVFASPSQPLSSKRSFLYSSRIGPILRRFPRKKLDLQVKAVATTLAPLEEIKEYKLPSWAMFEMGTAPVYWKTMNGLPPTSGEKLKLFYNPAASKLTLNEDYGVAFNGGFNQPIMCGGEPRAMLKKDRGKADSPIYTMQICIPKHAVNLIFSFTNGVDWDGPYRLQFQVPKRWQNKPIEFFNEGLANELSQDGACERAIFPDSNVVPTRCTMIANLTVEGGDRCNLDLVPGCMDTNSEHFNPYANVDDGSCPLELSDSDE

SEQ ID NO: 32331 - protein, 268 aa, Arabidopsis thaliana
  misc_feature (1)..(268): Ceres Seq. ID no. 15221136
MAAAANTSAVFASPSQPLSSKRSFLYSSRIGPILRRFPRKKLDLQVKAVATTLAPLEEIKEYKLPSWAMFEMGTAPVYWKTMNGLPPTSGEKLKLFYNPAASKLTLNEDYGVAFNGGFNQPIMCGGEPRAMLKKDRGKADSPIYTMQICIPKHAVNLIFSFTNGVDWDGPYRLQFQVPKRWQNKPIEFFNEGLANELSQDGACERAIFPDSNVVPTRCTMIANLTVEGGDRCNLDLVPGCMDTNSEHFNPYANVDDGSCPLELSDSDE

SEQ ID NO: 32332 - protein, 200 aa, Arabidopsis thaliana
  misc_feature (1)..(200): Ceres Seq. ID no. 15221137
MFEMGTAPVYWKTMNGLPPTSGEKLKLFYNPAASKLTLNEDYGVAFNGGFNQPIMCGGEPRAMLKKDRGKADSPIYTMQICIPKHAVNLIFSFTNGVDWDGPYRLQFQVPKRWQNKPIEFFNEGLANELSQDGACERAIFPDSNVVPTRCTMIANLTVEGGDRCNLDLVPGCMDTNSEHFNPYANVDDGSCPLELSDSDE

SEQ ID NO: 32333 - DNA, 1239 bp, Arabidopsis thaliana
  misc_feature (1)..(1239): Ceres Seq. ID no. 13592761
atgcatctaaaacaaactctatctactaactcgaaacacacttgcggtcttatctaaaacacaaaccaacaaaaagaaaaaatgggcttggtccgatcatttgctttggtcatagtcttccttagttgtctcatcgccgtttatggccaaggtacgaggatcgggttctactcgactacgtgccctaatgccgagacaattgttcggaccactgtggcatctcactttggttcagatccaaaggttgcacccgggttactgagaatgcacaaccatgattgctttgtccaaggttgtgatggttcggtgcttttatcgggacctaactctgaaagaaccgctggcgcaaacgttaacctccatggttttgaggtcattgacgatgccaagaggcagctcgaggcagcatgtcctggtgttgtctcttgtgctgatatcttggccttagcggctcgtgattcggtttctctcacaaacggacaaagttggcaagttccaacaggacgtagagatggaagagtttccttggcatcgaacgttaacaatcttccttctccaagtgactctctagccattcaacaaaggaaattctccgcttttcgcctcaacactcgcgatctcgtcactcttgttggaggaggacacacgatcggaacagctgcatgtgggtttatcacgaacaggatattcaactcgagcggaaacacagcagatccaacaatggaccaaacatttgtaccacaacttcaaagactttgtccccaaaacggcgacggatcagcacgtgttgatcttgacaccggaagtggaaacacttttgacacatcttatttcatcaatctcagccgtaacagaggaattcttcaatccgatcacgttctttggactagtccggccacaagatccatagtgcaagagtttatggcacctagaggcaacttcaatgtccagttcgcaaggtcaatggttaaaatgagtaatattggtgtgaagacggggacaaatggagaaattcgtagggtttgctctgcggttaattaatcagtgattaagtttttatggctaaaaaaaagtgtttatggctaactcttgttcaagggcattttttttatagtttgatttaaatttaaacccaatagaatagaaaggatatgagagaaacccaaaagtgggttgctgataaatgtatttcatttctttcggtttgacttggtggaataaataaagttcaatttcgtt

SEQ ID NO: 32334 - protein, 319 aa, Arabidopsis thaliana
  misc_feature (1)..(319): Ceres Seq. ID no. 13592762
MGLVRSFALVIVFLSCLIAVYGQGTRIGFYSTTCPNAETIVRTTVASHFGSDPKVAPGLLRMHNHDCFVQGCDGSVLLSGPNSERTAGANVNLHGFEVIDDAKRQLEAACPGVVSCADILALAARDSVSLTNGQSWQVPTGRRDGRVSLASNVNNLPSPSDSLAIQQRKFSAFRLNTRDLVTLVGGGHTIGTAACGFITNRIFNSSGNTADPTMDQTFVPQLQRLCPQNGDGSARVDLDTGSGNTFDTSYFINLSRNRGILQSDHVLWTSPATRSIVQEFMAPRGNFNVQFARSMVKMSNIGVKTGTNGEIRRVCSAVN

SEQ ID NO: 32335 - protein, 258 aa, Arabidopsis thaliana
  misc_feature (1)..(258): Ceres Seq. ID no. 13592763
MHNHDCFVQGCDGSVLLSGPNSERTAGANVNLHGFEVIDDAKRQLEAACPGVVSCADILALAARDSVSLTNGQSWQVPTGRRDGRVSLASNVNNLPSPSDSLAIQQRKFSAFRLNTRDLVTLVGGGHTIGTAACGFITNRIFNSSGNTADPTMDQTFVPQLQRLCPQNGDGSARVDLDTGSGNTFDTSYFINLSRNRGILQSDHVLWTSPATRSIVQEFMAPRGNFNVQFARSMVKMSNIGVKTGTNGEIRRVCSAVN

SEQ ID NO: 32336 - DNA, 1826 bp, Arabidopsis thaliana
  misc_feature (1)..(1826): Ceres Seq. ID no. 13592768
aattcattccattgtcgttacctttttgtttctcagactgttaccttacctgtaaagaagagagttaaagatctattgcaaaaaaactcaacctttaatctctctgcttcttctaattaagtaatttcaactacccttttggcgaaacctctcgatctattggtttggtactgaagaaaccgacttgagtctgatttgtttttggtgaaagccatggaagctataagaaagcaagctgcgaagctcagagagcaagtcgcgaggcaacagcaagcggttttgaagcatttagggcatgttaatgctgatgctgttgttgttgatgaagaagagcttcattgtcatcagaaacttcaagatctttatagctctactaaagctgctaagcgtttgcaaaggaacattgttcgtggacttgaaggtttcattgcgactggcacaaaggttgttgagatagggttgaagtttgctgaagattttaagaaatatggagatgagaatcctgatgctaatactcctctatcaagagtcgcacatcactttgggacctcttacaagtcggtggaagacgagagggaaactctcctcggagttcttagtgagcaggtttgtgagccaattcgtacgatgatatatagtgcgcctttggaggatgctcggcatttggtgaatcactatgacaggctgagacaagaagtcgaagctcaggcaactgatgtactgaggagaagatctaagttgaaggaatctgatatttctgaagaagcctacataaaacttaagaattccgaatcgagattagctgagctcaaatcaagtatgaaaactcttggcaaagaagctactaaggccatgttggaagtcgacgatcagcaacagaacgttacttctcagcgcctccgtgctctggttgaagccgagagatcataccatcgtaatgccctcgatatccttgacaagctacatgctgagatgattgctgaggaagaagctataggagcatcaccaaagtcactgcctttacatttagaggatagtgcttctcttccccaagaagaaccgatttcaaaaccctcgggagaggtcaaatcaaaccccttgggaaagatcaaaggaagtcgtcgagaagaagtcaagtctaatccccaagaagtaaccaaacccaatcccaaggacgaaatgaagtccagtccccaagaagaaaccaaatccaatcatcagaaagaaatcaagtctagtccacaggaagagatcaagaagtccaatggatctgatgatcatcacaatcatcaacttctcagtcagaatgattcctactttcttgcaaaggttgtgcacccgtttgatgctcaagccccaggggaactcagtctcgctgtcgatgattatgtaattgtgcgacaggtggctgggacaggctggtcagaaggagaatacaagggcaaagccggatggttcccgtctgcttacgttgagaaacaagagaaagctccggcgagcaagatcgtggaatcaaacgccaagtaacaatgatccctttctttaacatatacatacaaaaagtatgtgtaagatatgattgtgtttttcttccttcttacctatcttcgtaagtaaagatatgtttccacgagtaaatatgatcttgtaagagttatgatttgtgtgttttcttccttttcttcttatgtatcaacatgagtctaactctagactcttgagtcatatctctacgcagttgtgagaatcctgttttatcttttgtttgataagatcctctgtttcttctgtaatttactctgataatgataatgatctttcttgct

SEQ ID NO: 32337 - protein, 437 aa, Arabidopsis thaliana
  misc_feature (1)..(437): Ceres Seq. ID no. 13592769
MEAIRKQAAKLREQVARQQQAVLKHLGHVNADAVVVDEEELHCHQKLQDLYSSTKAAKRLQRNIVRGLEGFIATGTKVVEIGLKFAEDFKKYGDENPDANTPLSRVAHHFGTSYKSVEDERETLLGVLSEQVCEPIRTMIYSAPLEDARHLVNHYDRLRQEVEAQATDVLRRRSKLKESDISEEAYIKLKNSESRLAELKSSMKTLGKEATKAMLEVDDQQQNVTSQRLRALVEAERSYHRNALDILDKLHAEMIAEEEAIGASPKSLPLHLEDSASLPQEEPISKPSGEVKSNPLGKIKGSRREEVKSNPQEVTKPNPKDEMKSSPQEETKSNHQKEIKSSPQEEIKKSNGSDDHHNHQLLSQNDSYFLAKVVHPFDAQAPGELSLAVDDYVIVRQVAGTGWSEGEYKGKAGWFPSAYVEKQEKAPASKIVESNAK

SEQ ID NO: 32338 - protein, 299 aa, Arabidopsis thaliana
  misc_feature (1)..(299): Ceres Seq. ID no. 13592770
MIYSAPLEDARHLVNHYDRLRQEVEAQATDVLRRRSKLKESDISEEAYIKLKNSESRLAELKSSMKTLGKEATKAMLEVDDQQQNVTSQRLRALVEAERSYHRNALDILDKLHAEMIAEEEAIGASPKSLPLHLEDSASLPQEEPISKPSGEVKSNPLGKIKGSRREEVKSNPQEVTKPNPKDEMKSSPQEETKSNHQKEIKSSPQEEIKKSNGSDDHHNHQLLSQNDSYFLAKVVHPFDAQAPGELSLAVDDYVIVRQVAGTGWSEGEYKGKAGWFPSAYVEKQEKAPASKIVESNAK

SEQ ID NO: 32339 - protein, 235 aa, Arabidopsis thaliana
  misc_feature (1)..(235): Ceres Seq. ID no. 13592771
MKTLGKEATKAMLEVDDQQQNVTSQRLRALVEAERSYHRNALDILDKLHAEMIAEEEAIGASPKSLPLHLEDSASLPQEEPISKPSGEVKSNPLGKIKGSRREEVKSNPQEVTKPNPKDEMKSSPQEETKSNHQKEIKSSPQEEIKKSNGSDDHHNHQLLSQNDSYFLAKVVHPFDAQAPGELSLAVDDYVIVRQVAGTGWSEGEYKGKAGWFPSAYVEKQEKAPASKIVESNAK

SEQ ID NO: 32340 - DNA, 1479 bp, Arabidopsis thaliana
  misc_feature (1)..(1479): Ceres Seq. ID no. 13592772
acacacatataacaatctcttcttctctgacattacacaatggtggtttgagtttacagaagataataatggggaaaactagcaaatggtttcgaagtctcttaaccggaaagaaagagagaacaaaggaacatatcattcaaagcgagtgtgtattcacttcttccattccaggcactcctaaggagaaacgtcgatggagttttcgacgttcttcagcaactggaccaccgccaccagcttgtgctattacactgaaagattcaccaccaccgccgccaccaccacctccacctccaccgctacaacaaccatttgtggtcgaaatcgtggacaatgaagatgaacaaatcaagaacgtttcagctgaagagattgaagaatttgcagcaataaagattcaagcgtgctatcgttctcatttggcgaggaaagcattaagagcattaaaagggttagtgaaattacaagcactagtgagaggtcatttagtaaggaaacaagcaacagctacacttagatgtatgcaagcattaataacacttcaagccaaagctcgagaacagaggattcgtatgatcggaggagattcaacaaatccaagaacatcgattcacaaaaccaggatcaataacttttaccacgagaatgaagaaaacatcaagattgtggaaatggacattcaatcgaaaatgtactctccggctccttcggctttaaccgagatgagtcctcgcgcgtatagtagccatttcgaggattgtaactcattcaacacagctcaaagtagtccacaatgtttcagcagattcaaagagtattacaatggagatactttgtcttcttatgattaccctctcttccctaattacatggctaatactcagtcttctaaagccaaggctcggtctcaaagtgcgccgaagcagagacctcctgagatctatgagaagcagatgagtgggaggagaagatcttcgatggaagcaccgaggaataacggtgtcccgagagctgtaaggatgcagagatcttcatctcaactagggtcaaacacagccaaggaaagtcaacaacatcatcatcatcagtactatccgtggatggcgataaagctcgatagatctaatatttcgcttatggagagcgaatgcggatctacaagtaccgttatgactaataccaactacggtagacatgttgatgttcagggaaacaacaacatgtactgaacactgtgctttagaatttgagagattgctggaaaaataggcaagcctaaaaaacgaagaggacaggtttataggagtttttttatgatgatggagatttaacaatctctatatgtaaagcaaaaaatgtagtagactgtagaagtgactcatctcgtcttaaattttgatttttcctttttaattatcattcgaattaacgttaacagtatttgtcaaattcatggatgttactatgttcaaaacc

SEQ ID NO: 32341 - protein, 409 aa, Arabidopsis thaliana
  misc_feature (1)..(409): Ceres Seq. ID no. 13592773
THITISSSLTLHNGGLSLQKIIMGKTSKWFRSLLTGKKERTKEHIIQSECVFTSSIPGTPKEKRRWSFRRSSATGPPPPACAITLKDSPPPPPPPPPPPPLQQPFVVEIVDNEDEQIKNVSAEEIEEFAAIKIQACYRSHLARKALRALKGLVKLQALVRGHLVRKQATATLRCMQALITLQAKAREQRIRMIGGDSTNPRTSIHKTRINNFYHENEENIKIVEMDIQSKMYSPAPSALTEMSPRAYSSHFEDCNSFNTAQSSPQCFSRFKEYYNGDTLSSYDYPLFPNYMANTQSSKAKARSQSAPKQRPPEIYEKQMSGRRRSSMEAPRNNGVPRAVRMQRSSSQLGSNTAKESQQHHHHQYYPWMAIKLDRSNISLMESECGSTSTVMTNTNYGRHVDVQGNNNMY

SEQ ID NO: 32342 - protein, 387 aa, Arabidopsis thaliana
  misc_feature (1)..(387): Ceres Seq. ID no. 13592774
MGKTSKWFRSLLTGKKERTKEHIIQSECVFTSSIPGTPKEKRRWSFRRSSATGPPPPACAITLKDSPPPPPPPPPPPPLQQPFVVEIVDNEDEQIKNVSAEEIEEFAAIKIQACYRSHLARKALRALKGLVKLQALVRGHLVRKQATATLRCMQALITLQAKAREQRIRMIGGDSTNPRTSIHKTRINNFYHENEENIKIVEMDIQSKMYSPAPSALTEMSPRAYSSHFEDCNSFNTAQSSPQCFSRFKEYYNGDTLSSYDYPLFPNYMANTQSSKAKARSQSAPKQRPPEIYEKQMSGRRRSSMEAPRNNGVPRAVRMQRSSSQLGSNTAKESQQHHHHQYYPWMAIKLDRSNISLMESECGSTSTVMTNTNYGRHVDVQGNNNMY

SEQ ID NO: 32343 - protein, 235 aa, Arabidopsis thaliana
  misc_feature (1)..(235): Ceres Seq. ID no. 13592775
MQALITLQAKAREQRIRMIGGDSTNPRTSIHKTRINNFYHENEENIKIVEMDIQSKMYSPAPSALTEMSPRAYSSHFEDCNSFNTAQSSPQCFSRFKEYYNGDTLSSYDYPLFPNYMANTQSSKAKARSQSAPKQRPPEIYEKQMSGRRRSSMEAPRNNGVPRAVRMQRSSSQLGSNTAKESQQHHHHQYYPWMAIKLDRSNISLMESECGSTSTVMTNTNYGRHVDVQGNNNMY

SEQ ID NO: 32344 - DNA, 1093 bp, Arabidopsis thaliana
  misc_feature (1)..(1093): Ceres Seq. ID no. 13592776
accgaaagctccacaaaccccattaattaacaaaaaaccaaaagaaggcggcgcaaacaaaagataatgcaaccagagacctcagatcagatgttgtactcgtttcttgccggaaacgaagtcggcggtggagggtactgcgtctccggcgactacatgacgactatgcagagcttatgtgggtcttcgtcgtcgacgtcatcgtattacccactggcgatctccggcatcggagaaacgatggctcaagacagagctttagctgctttgaggaaccacaaagaagctgagagaagaaggagagagaggatcaattctcatctcaacaagcttcgtaacgtactctcttgtaattctaagaccgataaagccacactgctcgccaaagtagttcaacgagtcagagaacttaaacagcaaaccctagagacctccgactccgaccaaacattattaccatcagagaccgacgaaattagtgttctacactttggagactattcaaacgacggtcatataatcttcaaagcctctctatgttgtgaagatagatcagatctcttgccggaccttatggagattctcaagtctcttaacatgaagactctccgagctgagatggtaaccattggtggtcggacaagaagtgttcttgtcgtagctgctgacaaagagatgcacggcgtcgagtctgtgcattttttgcaaaatgctctcaagtcgctgcttgagcggtcaagcaagtcgttgatggaacgtagttctggtggtggaggaggagaacggtcaaagcggcgtcgtgcgctggatcacatcataatggtgtgaaatgatgagaattgagcacactaaaaagtctataattgattaatatatatagggtatgatcataattaacttggttataattaccaaaaccttttttattcctctttaataatatatatgttatatggttttagttactaagtcttgggagtgtaagcaaatgttgtaagtaggtttggtgtgttctttttcttttcttttttttctttttcaagaaaaagaaaaagatctatattatatataaagaatatttgtcatgttattt

SEQ ID NO: 32345 - protein, 253 aa, Arabidopsis thaliana
  misc_feature (1)..(253): Ceres Seq. ID no. 13592777
MQPETSDQMLYSFLAGNEVGGGGYCVSGDYMTTMQSLCGSSSSTSSYYPLAISGIGETMAQDRALAALRNHKEAERRRRERINSHLNKLRNVLSCNSKTDKATLLAKVVQRVRELKQQTLETSDSDQTLLPSETDEISVLHFGDYSNDGHIIFKASLCCEDRSDLLPDLMEILKSLNMKTLRAEMVTIGGRTRSVLVVAADKEMHGVESVHFLQNALKSLLERSSKSLMERSSGGGGGERSKRRRALDHIIMV

SEQ ID NO: 32346 - protein, 245 aa, Arabidopsis thaliana
  misc_feature (1)..(245): Ceres Seq. ID no. 13592778
MLYSFLAGNEVGGGGYCVSGDYMTTMQSLCGSSSSTSSYYPLAISGIGETMAQDRALAALRNHKEAERRRRERINSHLNKLRNVLSCNSKTDKATLLAKVVQRVRELKQQTLETSDSDQTLLPSETDEISVLHFGDYSNDGHIIFKASLCCEDRSDLLPDLMEILKSLNMKTLRAEMVTIGGRTRSVLVVAADKEMHGVESVHFLQNALKSLLERSSKSLMERSSGGGGGERSKRRRALDHIIMV

SEQ ID NO: 32347 - protein, 223 aa, Arabidopsis thaliana
  misc_feature (1)..(223): Ceres Seq. ID no. 13592779
MTTMQSLCGSSSSTSSYYPLAISGIGETMAQDRALAALRNHKEAERRRRERINSHLNKLRNVLSCNSKTDKATLLAKVVQRVRELKQQTLETSDSDQTLLPSETDEISVLHFGDYSNDGHIIFKASLCCEDRSDLLPDLMEILKSLNMKTLRAEMVTIGGRTRSVLVVAADKEMHGVESVHFLQNALKSLLERSSKSLMERSSGGGGGERSKRRRALDHIIMV

SEQ ID NO: 32348 - DNA, 1608 bp, Arabidopsis thaliana
  misc_feature (1)..(1608): Ceres Seq. ID no. 13592782
ctaatccaaaaacttcctagaaaagtaagtatatacctttctctgtatttccttcacctccggctaaatctccggcgaccgcgtaacttgttctccggtctgaatagtgaataaacacacacacggagccaaatccaggagaaattaggtttgaattagagagattaggagaatacaaattggtttggtggttttcaagtatgctaccaagtgggttgaaagaaacccaactccgtgagagcaacaacaaccaaaaagtccatcctcaaccaatggaagagtctatcaatcagaatcctgaagctatggaagcacttatctccaatctcttcggaaacatctcgtctttgaaatctgcttatatcgagcttcaaagtgctcatactccttacgatcccgagaagattcaggcagcggacaaagttgtcatttctgaactcaagaatctttccgaaatgaagcatttttacagagagaataaccccaaacctgtatgtgtctctccacaagactctcgtttagctgcagagatccaagagcagcagagtttgttgaagacttatgaggttatggtgaagaagtttcagtctgagattcagaacaaggattctgagatcacgcagatgctacagaagattgaggaagcaaaccagaaacggcttaagcttgataagaatcttaagttaagaggaatgtctacaaacgaaggttctaatggagatggaaatatgcagtttcctgacttaactactgaactctatgtatctacttacgaagctgctgctaaagccgtgcacgatttctccaagccgctaatcaacatgatgaaagcagcaggatgggatcttgattctgcagccaattctattgagcctgatgttgtttacgccaagaggcctcacaagaaatatgcatttgaatcatacatatgccaaaggatgttcagtgggtttcagcagaagaacttctcagtaaactcagagagtgctgcggttatggccgatgatgacacagacacctttttccgccagtttcttgctctcaaggacatggatccactagatgctctaggtacaaaccctgattccaactttggtatattctgcaggagcaagtatctcctcttggtccacccaaagatggaagcttctttctttggaaatctagaccagcgtgactacgtgacaggaggtgggcacccgaggactgcgttttaccaggccttcttaaaacttgcaaagtcgatatggatcttgcacaggcttgcttactcttttgatccagctgcaaagatcttccaagtgaaaaagggtagtgagttctctgattcatacatggaaagtgttgtgaagaacatagttgtggatgaaaaagaagagaacccaagagttggtcttatggttatgcctgggttttggattggtggcagtgtcattcaaagccgagtttatgtttctggtgtgaaggtccttgagtgaaggatctcaggaactctcttaatgcttcttcccactttgttgtgcaacttttattttctctttgttataagcaagcctatatgtatcatctattgttaaaaaaaaatggaattaatatcttcttcgtctc

SEQ ID NO: 32349 - protein, 425 aa, Arabidopsis thaliana
  misc_feature (1)..(425): Ceres Seq. ID no. 13592783
MLPSGLKETQLRESNNNQKVHPQPMEESINQNPEAMEALISNLFGNISSLKSAYIELQSAHTPYDPEKIQAADKVVISELKNLSEMKHFYRENNPKPVCVSPQDSRLAAEIQEQQSLLKTYEVMVKKFQSEIQNKDSEITQMLQKIEEANQKRLKLDKNLKLRGMSTNEGSNGDGNMQFPDLTTELYVSTYEAAAKAVHDFSKPLINMMKAAGWDLDSAANSIEPDVVYAKRPHKKYAFESYICQRMFSGFQQKNFSVNSESAAVMADDDTDTFFRQFLALKDMDPLDALGTNPDSNFGIFCRSKYLLLVHPKMEASFFGNLDQRDYVTGGGHPRTAFYQAFLKLAKSIWILHRLAYSFDPAAKIFQVKKGSEFSDSYMESVVKNIVVDEKEENPRVGLMVMPGFWIGGSVIQSRVYVSGVKVLE

SEQ ID NO: 32350 - protein, 401 aa, Arabidopsis thaliana
  misc_feature (1)..(401): Ceres Seq. ID no. 13592784
MEESINQNPEAMEALISNLFGNISSLKSAYIELQSAHTPYDPEKIQAADKVVISELKNLSEMKHFYRENNPKPVCVSPQDSRLAAEIQEQQSLLKTYEVMVKKFQSEIQNKDSEITQMLQKIEEANQKRLKLDKNLKLRGMSTNEGSNGDGNMQFPDLTTELYVSTYEAAAKAVHDFSKPLINMMKAAGWDLDSAANSIEPDVVYAKRPHKKYAFESYICQRMFSGFQQKNFSVNSESAAVMADDDTDTFFRQFLALKDMDPLDALGTNPDSNFGIFCRSKYLLLVHPKMEASFFGNLDQRDYVTGGGHPRTAFYQAFLKLAKSIWILHRLAYSFDPAAKIFQVKKGSEFSDSYMESVVKNIVVDEKEENPRVGLMVMPGFWIGGSVIQSRVYVSGVKVLE

SEQ ID NO: 32351 - protein, 390 aa, Arabidopsis thaliana
  misc_feature (1)..(390): Ceres Seq. ID no. 13592785
MEALISNLFGNISSLKSAYIELQSAHTPYDPEKIQAADKVVISELKNLSEMKHFYRENNPKPVCVSPQDSRLAAEIQEQQSLLKTYEVMVKKFQSEIQNKDSEITQMLQKIEEANQKRLKLDKNLKLRGMSTNEGSNGDGNMQFPDLTTELYVSTYEAAAKAVHDFSKPLINMMKAAGWDLDSAANSIEPDVVYAKRPHKKYAFESYICQRMFSGFQQKNFSVNSESAAVMADDDTDTFFRQFLALKDMDPLDALGTNPDSNFGIFCRSKYLLLVHPKMEASFFGNLDQRDYVTGGGHPRTAFYQAFLKLAKSIWILHRLAYSFDPAAKIFQVKKGSEFSDSYMESVVKNIVVDEKEENPRVGLMVMPGFWIGGSVIQSRVYVSGVKVLE

SEQ ID NO: 32352 - DNA, 1588 bp, Arabidopsis thaliana
  misc_feature (1)..(1588): Ceres Seq. ID no. 13592796
atctctgaatcactcataaaccctttcttcttccttgttcaaatccactcactcttggagagagacgactcaaacgcatagtctctcctctgtatttactcgttatcgtcactgtgagagagagagagagagagagcgcgcgcattcccccaattaaagcctctctgctccaaaccgtgatatactctttacgtwstttgtttttgcctttatccttccctagttgtgtataattttgttcttttcttatggagatggatctcagcaaggttactcttgacattttcacaaagcttgaacagaaatggctctctcactgcgactcctcccggaagactcgtatccttagcatcgacggtggcggtaccactggcattgtcgccgctgcttctattctccacctcgagcaccagatccgccttcaaaccggcgaccctcacgctcacatctctgatttcttcgacattgtcgccggaactggcatcggaggcattctcgccgccctccttgtcgccgacgacggctccggcaggccgatgttcactgccagagacgcggttaagtttgtcgcggagaagaactcggagctcttcgagatcaggtacaccggagttttcaggaggaacaagagatactcggggaagagcatggagagggttttggagacggcgtttaggagagaggacggtaaggtgttgacgatgaaggacacgtgtaagcctctccttgttccttgctacgacctcaaaacctctgctcctttcgttttctcacgcgccggcgcgtctgagtctccgagcttcgacttcgagctgtggaaagtctgccgtgccacgtcagcaacaccaagcctcttcaagccgttcagtgtagtgtcggtggacgggaaaacctcatgctcagccgtagacggcggtttggtgatgaacaatccaacagcagctgccgtcacgcacgtgctacacaacaaacgagatttcccgtcagtaaacggcgtagatgacttgcttgtactgtcgttgggaaacggtccgtcgaccatgtcatcatcaccagggaggaaactccgtcgtaacggagactgttcgacgtcaagtgtggtggacatagtggttgacggcgtttccgataccgtcgatcagatgctggggaacgctttctgctggaaccgtactgattacgttagaatccaggcgaacggtttgacgagcggcggagcggaggagttgctgaaagagagaggtgtggaaacggcgccgtttggggtaaaacggatactaacggagagtaacggagaaagaatagagggtttcgtgcaacgtcttgttgcgtcaggaaagtcaagtctacctccaagtccttgcaaggaatctgccgttaaccctctcgctgacggccgttaagtttcctttattattataaccctccccgtccgtgatgtaagaagtttgtaaccaaacccctgggttaattttttaaccccagccagcatcttcgagttaattaattagcctttctttttttctaatgactttagttgaggaattaataatggttaatgaatgatagtctttacttatttatcact

SEQ ID NO: 32353 - protein, 384 aa, Arabidopsis thaliana
  misc_feature (1)..(384): Ceres Seq. ID no. 15221154
MEMDLSKVTLDIFTKLEQKWLSHCDSSRKTRILSIDGGGTTGIVAAASILHLEHQIRLQTGDPHAHISDFFDIVAGTGIGGILAALLVADDGSGRPMFTARDAVKFVAEKNSELFEIRYTGVFRRNKRYSGKSMERVLETAFRREDGKVLTMKDTCKPLLVPCYDLKTSAPFVFSRAGASESPSFDFELWKVCRATSATPSLFKPFSVVSVDGKTSCSAVDGGLVMNNPTAAAVTHVLHNKRDFPSVNGVDDLLVLSLGNGPSTMSSSPGRKLRRNGDCSTSSVVDIVVDGVSDTVDQMLGNAFCWNRTDYVRIQANGLTSGGAEELLKERGVETAPFGVKRILTESNGERIEGFVQRLVASGKSSLPPSPCKESAVNPLADGR

SEQ ID NO: 32354 - protein, 382 aa, Arabidopsis thaliana
  misc_feature (1)..(382): Ceres Seq. ID no. 15221155
MDLSKVTLDIFTKLEQKWLSHCDSSRKTRILSIDGGGTTGIVAAASILHLEHQIRLQTGDPHAHISDFFDIVAGTGIGGILAALLVADDGSGRPMFTARDAVKFVAEKNSELFEIRYTGVFRRNKRYSGKSMERVLETAFRREDGKVLTMKDTCKPLLVPCYDLKTSAPFVFSRAGASESPSFDFELWKVCRATSATPSLFKPFSVVSVDGKTSCSAVDGGLVMNNPTAAAVTHVLHNKRDFPSVNGVDDLLVLSLGNGPSTMSSSPGRKLRRNGDCSTSSVVDIVVDGVSDTVDQMLGNAFCWNRTDYVRIQANGLTSGGAEELLKERGVETAPFGVKRILTESNGERIEGFVQRLVASGKSSLPPSPCKESAVNPLADGR

SEQ ID NO: 32355 - protein, 288 aa, Arabidopsis thaliana
  misc_feature (1)..(288): Ceres Seq. ID no. 15221156
MFTARDAVKFVAEKNSELFEIRYTGVFRRNKRYSGKSMERVLETAFRREDGKVLTMKDTCKPLLVPCYDLKTSAPFVFSRAGASESPSFDFELWKVCRATSATPSLFKPFSVVSVDGKTSCSAVDGGLVMNNPTAAAVTHVLHNKRDFPSVNGVDDLLVLSLGNGPSTMSSSPGRKLRRNGDCSTSSVVDIVVDGVSDTVDQMLGNAFCWNRTDYVRIQANGLTSGGAEELLKERGVETAPFGVKRILTESNGERIEGFVQRLVASGKSSLPPSPCKESAVNPLADGR

SEQ ID NO: 32356 - DNA, 1669 bp, Arabidopsis thaliana
  misc_feature (1)..(1669): Ceres Seq. ID no. 13592797
actagtttcctttccttagtaaaaccctacatttctccgcccgcctttgatttctccccggccgttcccgccgccggtctccgatttaaccagggttgagtctaattccttctttttgtgctcattgctgtcggattctctaccggcgttacatcgaccagccagactcttccccatttgactgctttagtgattcaatcgctcttttagattctggaagttgtgactcagtatctccccttcaacgaattagcatcctgcgcaagaatgtctattgcatcatcacttacttcagccacactttgcggcgcctcagtttttcctaaagcattagcctgcagctctgagttccctatcaatcttcccagcccttttgaaagttcaaagatttgtttgacttcgtttcctgcctctagggatctcaagaaaaatgctactttgaatctgactcgaaatgttggtccagtcaggtgtcatgctatgcaagctgggacgagggagttgaagaaatttgaacttagtgatgtgattgaagggaaacagtttgatagagagatgctaagcgctatattcgatgttgcacgcgaaatggaaaagatagaaaagagctcttcacaaagcgaaatcctcaagggttatttaaaggctaccctcttttatgagccttctacccgtaccaggctttcatttgaatctgctatgaaacgccttggaggtgaagtcttaactactgagaacgctagagagttttcgtctgccgcgaaaggggaaacacttgaagacacaataagaacagtggagggttattcagatataattgtgatgcgacattttgaaagcggtgctgcaagaaaagctgcagctactgccaatatacctgtcattaatgcaggtgatggtcctggagagcatcctactcaggctctattggacgtctataccatccaaagtgaaattggaaaattagatggcatcagtgtagccttagttggagaccttgccaacggaaggactgtgcggtctcttgcatacttgcttgccaagttcaaagacgtgaagatctactttgtttcccctgaaattgtgaaaatgaaggatgatataaaagactatttgacatcaagcggggttgaatgggaagaaagttcagatttaatggaagtagcatccaagtgtgatgtagtttatcaaacacgaatccaaagagagaggtttggagaaaggctggacctttacgaagcagctcgtgggaagtatatcgtagacaaggatctgttaggagtgatgcagaaaaaagctattatcatgcatcctttaccgagattggatgaaatcaccgcagatgttgatgctgatccaagagctgcctacttcagacaagcaaagaacggtttgttcattagaatggctcttctaaagctactgcttgtcggttggtgattggatagttcatggtcgttaagttaaatcctttaatggactgattctcaagcctaccatgagctcaaggaatctgcaataataaaatccgaagctttagtgatttttgagtgttaagcacaaaagctgtgatcttgatgttaattaaaagaaggatctgttggtttgttggttaaaagactgatatgaggaagagttgttgaacttaatgaataaattgatttgagct

SEQ ID NO: 32357 - protein, 390 aa, Arabidopsis thaliana
  misc_feature (1)..(390): Ceres Seq. ID no. 13592798
MSIASSLTSATLCGASVFPKALACSSEFPINLPSPFESSKICLTSFPASRDLKKNATLNLTRNVGPVRCHAMQAGTRELKKFELSDVIEGKQFDREMLSAIFDVAREMEKIEKSSSQSEILKGYLKATLFYEPSTRTRLSFESAMKRLGGEVLTTENAREFSSAAKGETLEDTIRTVEGYSDIIVMRHFESGAARKAAATANIPVINAGDGPGEHPTQALLDVYTIQSEIGKLDGISVALVGDLANGRTVRSLAYLLAKFKDVKIYFVSPEIVKMKDDIKDYLTSSGVEWEESSDLMEVASKCDVVYQTRIQRERFGERLDLYEAARGKYIVDKDLLGVMQKKAIIMHPLPRLDEITADVDADPRAAYFRQAKNGLFIRMALLKLLLVGW

SEQ ID NO: 32358 - protein, 319 aa, Arabidopsis thaliana
  misc_feature (1)..(319): Ceres Seq. ID no. 13592799
MQAGTRELKKFELSDVIEGKQFDREMLSAIFDVAREMEKIEKSSSQSEILKGYLKATLFYEPSTRTRLSFESAMKRLGGEVLTTENAREFSSAAKGETLEDTIRTVEGYSDIIVMRHFESGAARKAAATANIPVINAGDGPGEHPTQALLDVYTIQSEIGKLDGISVALVGDLANGRTVRSLAYLLAKFKDVKIYFVSPEIVKMKDDIKDYLTSSGVEWEESSDLMEVASKCDVVYQTRIQRERFGERLDLYEAARGKYIVDKDLLGVMQKKAIIMHPLPRLDEITADVDADPRAAYFRQAKNGLFIRMALLKLLLVGW

SEQ ID NO: 32359 - protein, 294 aa, Arabidopsis thaliana
  misc_feature (1)..(294): Ceres Seq. ID no. 13592800
MLSAIFDVAREMEKIEKSSSQSEILKGYLKATLFYEPSTRTRLSFESAMKRLGGEVLTTENAREFSSAAKGETLEDTIRTVEGYSDIIVMRHFESGAARKAAATANIPVINAGDGPGEHPTQALLDVYTIQSEIGKLDGISVALVGDLANGRTVRSLAYLLAKFKDVKIYFVSPEIVKMKDDIKDYLTSSGVEWEESSDLMEVASKCDVVYQTRIQRERFGERLDLYEAARGKYIVDKDLLGVMQKKAIIMHPLPRLDEITADVDADPRAAYFRQAKNGLFIRMALLKLLLVGW

SEQ ID NO: 32360 - DNA, 1936 bp, Arabidopsis thaliana
  misc_feature (1)..(1936): Ceres Seq. ID no. 13592801
attcaatacacataatttacttctttctttataactaccatattctcaatcacaacactcgccactgtttcgaatagatggcttctatttcaaccccttttccgatttctctccacccaaaaaccgtacgatcaaagccgttgaaattccgagttttgacccgtccgatcaaagcttccgggtcagaaactcctgatctaaccgtagcgacacgaaccggatccaaagatctcccgatccgaaacataccgggaaactacggtttaccaatcgtaggaccaatcaaagaccgttgggattacttttacgaccaaggagctgaagagttcttcaaatcacgaatccgtaaatacaactccacggtgtacagagtcaacatgccaccgggagcttttatcgccgagaatccacaagtcgtggctttactcgacggtaaaagcttcccggttttattcgatgtcgataaagtcgaaaagaaagatctcttcaccggtacttacatgccgtcaacggaactcaccggaggctaccgtatcctctcgtacctcgatccatcggagccgaaacacgaaaagctcaaaaatctccttttcttcctcctcaagtcatctcgaaaccggatcttccctgagtttcaagctacttactccgagcttttcgattctttggagaaagagctttcccttaaagggaaagcggatttcggcggttccagcgacggaaccgcctttaatttcttggctcgagctttctacgggacgaatcccgcagatacaaagctcaaagccgacgcaccgggtttgatcactaaatgggttttattcaatctccatccattactctctattggtttaccgagagttatagaagaacctctcatccatacatttagtctaccaccggcgttagtcaaatctgattaccagagactctacgagtttttcttagaatccgccggtgatattctcgttgaagccgataaattgkktawacwcamkaaagttggaackggaggggaagctactcacaatcttctcttcgccacgtgcttcaacacgtggggtgggatgaagattttgtttccgaatatggttaaacggatcgggcgggcgggtcatcaagttcataacagattagcggaggagattagatctgtgattaaatccaacggtggagaactcacgatgggagcgattgagaaaatggagttaaccaaatcagtggtttacgaatgtctccggtttgaaccaccggttacggctcaatacggtagagcgaagaaggatttggttatcgaaagccacgacgcggcgtttaaagtcaaagccggtgaaatgctttacggttatcaaccgttggcgacgagagatccgaagatttttgatcgggcggatgagtttgtgccggagagattcgtcggagaagaaggagagaagcttttgaggcatgtgttgtggtcgaatggaccggagacggagactccgacggtggggaataaacaatgcgccggtaaggattttgttgttttggtggcgaggttgtttgtgattgagattttccggcgatatgattcgtttgatattgaggttggtacgtcgccgttaggaagctccgttaatttctcgtcgttaaggaaagctagcttttaggagccaagggtaaaatttgtaattgtttatgttcgcacgtgtgtagtccatctgttttcttgttccagtttcgtgaattttgagaaaatgttgtataatctgttgctgctctacatgttcgttttttttgtcataatattaaagttcaagctggtaataagtatttacaaatctgtgagataatttcaaatacacaagagcatattctttataaaaaaagcacgagttttttacactcaaattttttttgagcctgtgaataataggttttttttaaaaaaaaaccc

SEQ ID NO: 32361 - protein, 523 aa, Arabidopsis thaliana
  misc_feature (1)..(523): Ceres Seq. ID no. 15221157
  misc_feature (304)..(304): Xaa is any aa, unknown or other
  misc_feature (305)..(305): Xaa is any aa, unknown or other
  misc_feature (306)..(306): Xaa is any aa, unknown or other
  misc_feature (307)..(307): Xaa is any aa, unknown or other
  misc_feature (311)..(311): Xaa is any aa, unknown or other
MASISTPFPISLHPKTVRSKPLKFRVLTRPIKASGSETPDLTVATRTGSKDLPIRNIPGNYGLPIVGPIKDRWDYFYDQGAEEFFKSRIRKYNSTVYRVNMPPGAFIAENPQVVALLDGKSFPVLFDVDKVEKKDLFTGTYMPSTELTGGYRILSYLDPSEPKHEKLKNLLFFLLKSSRNRIFPEFQATYSELFDSLEKELSLKGKADFGGSSDGTAFNFLARAFYGTNPADTKLKADAPGLITKWVLFNLHPLLSIGLPRVIEEPLIHTFSLPPALVKSDYQRLYEFFLESAGDILVEADKLXXXXKVGXGGEATHNLLFATCFNTWGGMKILFPNMVKRIGRAGHQVHNRLAEEIRSVIKSNGGELTMGAIEKMELTKSVVYECLRFEPPVTAQYGRAKKDLVIESHDAAFKVKAGEMLYGYQPLATRDPKIFDRADEFVPERFVGEEGEKLLRHVLWSNGPETETPTVGNKQCAGKDFVVLVARLFVIEIFRRYDSFDIEVGTSPLGSSVNFSSLRKASF

SEQ ID NO: 32362 - protein, 423 aa, Arabidopsis thaliana
  misc_feature (1)..(423): Ceres Seq. ID no. 15221158
  misc_feature (204)..(204): Xaa is any aa, unknown or other
  misc_feature (205)..(205): Xaa is any aa, unknown or other
  misc_feature (206)..(206): Xaa is any aa, unknown or other
  misc_feature (207)..(207): Xaa is any aa, unknown or other
  misc_feature (211)..(211): Xaa is any aa, unknown or other
MPPGAFIAENPQVVALLDGKSFPVLFDVDKVEKKDLFTGTYMPSTELTGGYRILSYLDPSEPKHEKLKNLLFFLLKSSRNRIFPEFQATYSELFDSLEKELSLKGKADFGGSSDGTAFNFLARAFYGTNPADTKLKADAPGLITKWVLFNLHPLLSIGLPRVIEEPLIHTFSLPPALVKSDYQRLYEFFLESAGDILVEADKLXXXXKVGXGGEATHNLLFATCFNTWGGMKILFPNMVKRIGRAGHQVHNRLAEEIRSVIKSNGGELTMGAIEKMELTKSVVYECLRFEPPVTAQYGRAKKDLVIESHDAAFKVKAGEMLYGYQPLATRDPKIFDRADEFVPERFVGEEGEKLLRHVLWSNGPETETPTVGNKQCAGKDFVVLVARLFVIEIFRRYDSFDIEVGTSPLGSSVNFSSLRKASF

SEQ ID NO: 32363 - protein, 382 aa, Arabidopsis thaliana
  misc_feature (1)..(382): Ceres Seq. ID no. 15221159
  misc_feature (163)..(163): Xaa is any aa, unknown or other
  misc_feature (164)..(164): Xaa is any aa, unknown or other
  misc_feature (165)..(165): Xaa is any aa, unknown or other
  misc_feature (166)..(166): Xaa is any aa, unknown or other
  misc_feature (170)..(170): Xaa is any aa, unknown or other
MPSTELTGGYRILSYLDPSEPKHEKLKNLLFFLLKSSRNRIFPEFQATYSELFDSLEKELSLKGKADFGGSSDGTAFNFLARAFYGTNPADTKLKADAPGLITKWVLFNLHPLLSIGLPRVIEEPLIHTFSLPPALVKSDYQRLYEFFLESAGDILVEADKLXXXXKVGXGGEATHNLLFATCFNTWGGMKILFPNMVKRIGRAGHQVHNRLAEEIRSVIKSNGGELTMGAIEKMELTKSVVYECLRFEPPVTAQYGRAKKDLVIESHDAAFKVKAGEMLYGYQPLATRDPKIFDRADEFVPERFVGEEGEKLLRHVLWSNGPETETPTVGNKQCAGKDFVVLVARLFVIEIFRRYDSFDIEVGTSPLGSSVNFSSLRKASF

SEQ ID NO: 32364 - DNA, 1267 bp, Arabidopsis thaliana
  misc_feature (1)..(1267): Ceres Seq. ID no. 13592804
agaacatcctaatcgaaaaatgcatctaaaacaaactctatctactaactcgaaacacacttgcgatctttatctaavacacaaaccaacaaaaagaaaaatgggcttggtcagatcatttgctttgttcttagtcttccttagttgtctcatcgcggtgtatggccaaggtacgaggatcgggttctactcgaccacgtgccctaatgccgagacgattgttcggaccactgtagcatctcactttagttcagatccaaaggttgcaccggggttactgagaatgcacaaccatgattgctttgtccaaggttgtgatggttcggtgctattatcgggacctaactctgaaagaaccgctggcgcaarcgttaaccttcatggttttgaagtcattgacgatgccaagaggcagctcgaggcagcatgtcctggtgttgtctcttgtgctgatatattggccttaagcggctcgtgahtccgttgctbgttyacaacacrgayaaagttggmackggagksssgaacaggacgtagagatggaagagtttccttggcatcgaacgttaacaatcttccttctccaagtgactctctagccattcaacaaaggaaattcgccgcttttcgcctcaacactcgcgatctcgtcactcttgttggaggaggacacacgatcggaacagctgcatgtgggtttatcacgaacaggatattcaactcgagcggaaacacagcagatccaacaatggaccmwacatttgtaccacaacttcaaagactttgtccccaaaacggcgacggatcagcacgtgttgatcttgacaccggaagtggaaacacttttgacacatcttatttcatcaatctcaaccgtaacagaggaattcttcaatccgaccacgttctttggactagtccggccacaagatccatagtgcaagagtttatggcacctagaggcaacttcaatgtccagttcgcaaggtcaatggttaaaatgagtaatattggtgtgaagacggggacaaatggagaaattcgtagggtttgctctgcggttaattaatcagtgattaagtttttatggctaaaaaaaagtgtttatggctaactcttgttcaagggcattttttttatagtttgatttaaatttaaacccaatagaatagaaaggatatgagagaaacccaaaagtgggttgctgataaatgtatttcatttctttcggtttgacttggtggaataaataaagttcaatttcgtc

SEQ ID NO: 32365 - protein, 158 aa, Arabidopsis thaliana
  misc_feature (1)..(158): Ceres Seq. ID no. 15221165
  misc_feature (26)..(26): Xaa is any aa, unknown or other
  misc_feature (123)..(123): Xaa is any aa, unknown or other
EHPNRKMHLKQTLSTNSKHTCDLYLXHKPTKRKMGLVRSFALFLVFLSCLIAVYGQGTRIGFYSTTCPNAETIVRTTVASHFSSDPKVAPGLLRMHNHDCFVQGCDGSVLLSGPNSERTAGAXVNLHGFEVIDDAKRQLEAACPGVVSCADILALSGS

SEQ ID NO: 32366 - protein, 152 aa, Arabidopsis thaliana
  misc_feature (1)..(152): Ceres Seq. ID no. 15221166
  misc_feature (20)..(20): Xaa is any aa, unknown or other
  misc_feature (117)..(117): Xaa is any aa, unknown or other
MHLKQTLSTNSKHTCDLYLXHKPTKRKMGLVRSFALFLVFLSCLIAVYGQGTRIGFYSTTCPNAETIVRTTVASHFSSDPKVAPGLLRMHNHDCFVQGCDGSVLLSGPNSERTAGAXVNLHGFEVIDDAKRQLEAACPGVVSCADILALSGS

SEQ ID NO: 32367 - protein, 125 aa, Arabidopsis thaliana
  misc_feature (1)..(125): Ceres Seq. ID no. 15221167
  misc_feature (90)..(90): Xaa is any aa, unknown or other
MGLVRSFALFLVFLSCLIAVYGQGTRIGFYSTTCPNAETIVRTTVASHFSSDPKVAPGLLRMHNHDCFVQGCDGSVLLSGPNSERTAGAXVNLHGFEVIDDAKRQLEAACPGVVSCADILALSGS

SEQ ID NO: 32368 - DNA, 1887 bp, Arabidopsis thaliana
  misc_feature (1)..(1887): Ceres Seq. ID no. 13592813
aacacttgagagagtctctgtctctgtaaaagatatttgagcttgagaagaacagaagaaacttccaggatcaatcaatcgatcaactttagtgaactaactcttgatttttcattcgaagttatggaatcggttcccgaatccgtaccatcgccgaactcgaatacaccgtcaataccaccgccggtgaactccgtaccgcctttcttgagtaaaacctacgacatggttgatgatccgttgaccaatgaggtcgtttcgtggagcagcgggaacaacagcttcgtcgtctggagtgtcccggagttctcgaaggtgctcttgcccaagtatttcaagcacaacaacttctccagcttcgtcagacagttaaatacttatggtttcagaaaagttgatcctgaccgatgggaatttgcaaatgaaggatttcttagaggccgaaaacaactactgaagagtattgtcaggagaaaaccttcgcatgtgcagcagaatcagcaacaaactcaagttcagagctcatctcttggtgcttgtgtcgaggtggggaagtttggaatagaagaagaagtggaaagacttaagcgggataagaatgttcttatgcaagaactcgtcaggttaaggcagcaacagcaagctactgaaaaccaactgcagaatgtgggacagaaagttcaggtgatggagcaaaggcaacaacaaatgatgtcgtttttagcaaaggctgttcaaagtccaggtttcttaaaccagttagtacaacagaataataatgatggcaacagacaaattccaggaagcaacaaaaagaggagacttcctgtagatgagcaggagaatcgtggcgacaatgtggctaatggtcttaaccgccagattgttagatatcagccgtcgataaacgaagcagcacaaaatatgcttcgacagttcttaaatactagtacctcacctcggtatgaatcagtttcaaacaatcctgacagtttcctattgggtgatgttcccagttctacctctgtagacaatgggaacccttcaagtagagtttctggagtaacattggccgagttttcacccaacacagttcagtcagcaacgaatcaagtacccgaagcaagtttggctcatcatcctcaagctggtctggttcagccaaatataggtcaaagtccggctcaaggagcagcacctgcagactcttggagccctgaatttgatttagttggatgcgagacagatagtggagagtgttttgatccaataatggctgttttagatgagtcagaaggcgatgcaatttctcctgaaggtgagggaaagatgaatgagttactggagggagtccctaagctgcccggaatccaagatccattctgggaacagttcttttctgttgaactcccagcgattgcagatacagacgagattctatcaggatcagtggagaataatgacttggtaatggaacaagaaccaaacgagtggacccgtaatgaacaacaaatgaagtatcttactgaacaaatgggactgctttcctcagaagcacagaggaaataaaggggaggttgcgaaaggagatatcaaggaaggaggaatatatcagatggtgtgtataccctttacatttttacttaaatgaagaaaaaaaacagagagaagaaacataaaagatttaccaccaagcttgtgaatagttagtagagatcggtttttgtgttgtttatattatacttttgtgtgaaaacgttcatcttgttcaattatcatctcagtagtacggtaatctgttggtcactgaccggttaatgaccaaaaaatcaagattattttcttatgtttatttcttttgatcatgaagatccttatggagggggg

SEQ ID NO: 32369 - protein, 481 aa, Arabidopsis thaliana
  misc_feature (1)..(481): Ceres Seq. ID no. 15221168
MESVPESVPSPNSNTPSIPPPVNSVPPFLSKTYDMVDDPLTNEVVSWSSGNNSFVVWSVPEFSKVLLPKYFKHNNFSSFVRQLNTYGFRKVDPDRWEFANEGFLRGRKQLLKSIVRRKPSHVQQNQQQTQVQSSSLGACVEVGKFGIEEEVERLKRDKNVLMQELVRLRQQQQATENQLQNVGQKVQVMEQRQQQMMSFLAKAVQSPGFLNQLVQQNNNDGNRQIPGSNKKRRLPVDEQENRGDNVANGLNRQIVRYQPSINEAAQNMLRQFLNTSTSPRYESVSNNPDSFLLGDVPSSTSVDNGNPSSRVSGVTLAEFSPNTVQSATNQVPEASLAHHPQAGLVQPNIGQSPAQGAAPADSWSPEFDLVGCETDSGECFDPIMAVLDESEGDAISPEGEGKMNELLEGVPKLPGIQDPFWEQFFSVELPAIADTDEILSGSVENNDLVMEQEPNEWTRNEQQMKYLTEQMGLLSSEAQRK

SEQ ID NO: 32370 - protein, 447 aa, Arabidopsis thaliana
  misc_feature (1)..(447): Ceres Seq. ID no. 15221169
MVDDPLTNEVVSWSSGNNSFVVWSVPEFSKVLLPKYFKHNNFSSFVRQLNTYGFRKVDPDRWEFANEGFLRGRKQLLKSIVRRKPSHVQQNQQQTQVQSSSLGACVEVGKFGIEEEVERLKRDKNVLMQELVRLRQQQQATENQLQNVGQKVQVMEQRQQQMMSFLAKAVQSPGFLNQLVQQNNNDGNRQIPGSNKKRRLPVDEQENRGDNVANGLNRQIVRYQPSINEAAQNMLRQFLNTSTSPRYESVSNNPDSFLLGDVPSSTSVDNGNPSSRVSGVTLAEFSPNTVQSATNQVPEASLAHHPQAGLVQPNIGQSPAQGAAPADSWSPEFDLVGCETDSGECFDPIMAVLDESEGDAISPEGEGKMNELLEGVPKLPGIQDPFWEQFFSVELPAIADTDEILSGSVENNDLVMEQEPNEWTRNEQQMKYLTEQMGLLSSEAQRK

SEQ ID NO: 32371 - protein, 320 aa, Arabidopsis thaliana
  misc_feature (1)..(320): Ceres Seq. ID no. 15221170
MQELVRLRQQQQATENQLQNVGQKVQVMEQRQQQMMSFLAKAVQSPGFLNQLVQQNNNDGNRQIPGSNKKRRLPVDEQENRGDNVANGLNRQIVRYQPSINEAAQNMLRQFLNTSTSPRYESVSNNPDSFLLGDVPSSTSVDNGNPSSRVSGVTLAEFSPNTVQSATNQVPEASLAHHPQAGLVQPNIGQSPAQGAAPADSWSPEFDLVGCETDSGECFDPIMAVLDESEGDAISPEGEGKMNELLEGVPKLPGIQDPFWEQFFSVELPAIADTDEILSGSVENNDLVMEQEPNEWTRNEQQMKYLTEQMGLLSSEAQRK

SEQ ID NO: 32372 - DNA, 1798 bp, Arabidopsis thaliana
  misc_feature (1)..(1798): Ceres Seq. ID no. 13592818
attcttttgagctaccgattttgccgttttcgtgcagtaatttcgagaaagcgtggaccatttctggattccaaagctgaagaagatccaaacattgtgaagatagaatccgtttactaatgttagaagcatcgaagaatgaaaatgtgctgcaagtgaaggaatgaaagtgcgttgtagttcttcgtatcacgactttggcgtgcatagactgtagatagatatcagataacaacctgtagtggaaatatgagaagacctagtcaaatgatgaggcttctattaacatcctttttcggtgttattgttggtttccttatgggtattacttttccaaccttgactttaactaagatgaatcttccatccacattgtttccctcgattgatcttgcatacattgaggataaatactctgacatatcaagacaaagactatttggttcttggtcttcgacaaaaggcctcaaactcaagaatgacatccctgaccctccatataactataatgacactaagatatgggtttcgactaacccccgtggtgctgagaggctaccaccagatatagtcacgcctgaatcagatttttacctccgtcgactgtggggcgaccctaatgaggatttaacagtcaagcagcggtatctagtaacatttacggttggctatgatcagaggaaaaatatagacactgtgttgaagaagttctcagataacttctctataatgctgtttcactacgatggccgggcagcgaatgggaagagtttgaatggtccaagcgagccattcatgtgagcattcggaaacaaacaaaatggtggtacgctaagcgatttcttcatcctgacatagttgccccctatgaatatatcttcatatgggatgaggatcttggcgtggaacactttgattcggaaaaatatctggcggtggtgaagaagcatggtttggaaatctcacagcctggattagagccatatgaagggctcacatgggagatgaccaagaaaagagacgacactgaagtccacaagcatgctgaggaaaggaatgggtggtgcactgatcccaatttacccccttgtgcagcgtttgtggagattatggctcctgttttctcccgcaaggcatggcgctgtgtgtcgcatatgattcagaacgatttgattcatggatggggtctggactttgccgttcggaaatgtgttcagaacgcacacgagaaaattggagttgtagatgctcaatggattatacatcaaggtgttccatcattagggaattaaggacaaccagagcaagggaaacaaccatgggaaggggtgagagaacgatgcaggagagagtggacaatgtttcaagacagattggatgatgctgaaaaagcttattttgaagcatctgctcacaagaatgcttcttcacggcctcacgggtaataaggaaacatatagtctctccctccgacttccactctctttgtttaccctgttaattttgttcccggagctgtgctttgatttcgtgtttatggaagagaatagtctggtcgagagaagataaattgttagcagctaagcacattcattaacatctgattagtctttcttttttcttttcttttcttaactctgttaactcttattgttgatgagaactccggtggagagtagagttagaggtagacaacaataaaaaaagggagattaactgtgatgggtaagaaattaggtgttattaccagaacacgacagaactttttttaattactgttatatttcgagtttttttt

SEQ ID NO: 32373 - protein, 183 aa, Arabidopsis thaliana
  misc_feature (1)..(183): Ceres Seq. ID no. 13592819
MRRPSQMMRLLLTSFFGVIVGFLMGITFPTLTLTKMNLPSTLFPSIDLAYIEDKYSDISRQRLFGSWSSTKGLKLKNDIPDPPYNYNDTKIWVSTNPRGAERLPPDIVTPESDFYLRRLWGDPNEDLTVKQRYLVTFTVGYDQRKNIDTVLKKFSDNFSIMLFHYDGRAANGKSLNGPSEPFM

SEQ ID NO: 32374 - protein, 177 aa, Arabidopsis thaliana
  misc_feature (1)..(177): Ceres Seq. ID no. 13592820
MMRLLLTSFFGVIVGFLMGITFPTLTLTKMNLPSTLFPSIDLAYIEDKYSDISRQRLFGSWSSTKGLKLKNDIPDPPYNYNDTKIWVSTNPRGAERLPPDIVTPESDFYLRRLWGDPNEDLTVKQRYLVTFTVGYDQRKNIDTVLKKFSDNFSIMLFHYDGRAANGKSLNGPSEPFM

SEQ ID NO: 32375 - protein, 176 aa, Arabidopsis thaliana
  misc_feature (1)..(176): Ceres Seq. ID no. 13592821
MRLLLTSFFGVIVGFLMGITFPTLTLTKMNLPSTLFPSIDLAYIEDKYSDISRQRLFGSWSSTKGLKLKNDIPDPPYNYNDTKIWVSTNPRGAERLPPDIVTPESDFYLRRLWGDPNEDLTVKQRYLVTFTVGYDQRKNIDTVLKKFSDNFSIMLFHYDGRAANGKSLNGPSEPFM

SEQ ID NO: 32376 - DNA, 701 bp, Arabidopsis thaliana
  misc_feature (1)..(701): Ceres Seq. ID no. 13592829
attgaagaaaaagctttgacaaaaccagggaaagagacagagagagataatggcggctaaactaatctgttcgtctttaacagtgcattcaatggcaaataagaagccatcaccttctgctgcaacaagaacaataacctcaaagaagagcacagcgactccacaggtgaaactgctgacaagagtcgagcagctcaagcttctgaccaaagccgagaaagcaggacttttgtctttagcagagaaatcaggtttctctctatcgaccatcgagcgtcttggattgctgaccaaagcagaggagttcggcgttttgtctgccgccacaaacccggaaacgcctggaacgttattcactttgagcctcggtttactccttcttggaccggtttttgcatatgtggttcctgaagattacacttgggaagtagtgattcaggttcttgtggctctactctctgttcttggtggctctgctgcttttgctgcttctggttttgtctccaatttgcagaaatctgattagcccgatcgttttttttttgtatcaaatatatttacccggtgtagcaagagacttttctgcatttaagatgaaaactttataatgtatttgatctacattgtatcaaccagtcattttcactattttctatctatgtaaatggtttcatatacagaatccaagagaaacgttttgc

SEQ ID NO: 32377 - protein, 158 aa, Arabidopsis thaliana
  misc_feature (1)..(158): Ceres Seq. ID no. 15221171
MAAKLICSSLTVHSMANKKPSPSAATRTITSKKSTATPQVKLLTRVEQLKLLTKAEKAGLLSLAEKSGFSLSTIERLGLLTKAEEFGVLSAATNPETPGTLFTLSLGLLLLGPVFAYVVPEDYTWEVVIQVLVALLSVLGGSAAFAASGFVSNLQKSD

SEQ ID NO: 32378 - protein, 144 aa, Arabidopsis thaliana; identical to SEQ ID NO: 30930
  misc_feature (1)..(144): Ceres Seq. ID no. 15221172

SEQ ID NO: 32379 - DNA, 1752 bp, Arabidopsis thaliana
  misc_feature (1)..(1752): Ceres Seq. ID no. 13592842
gcctacccaacaaagacaaaacgtaactgtcttcttcttcttactcttccatcttttgtactttcgagtttaggatgttagatctgggaaacatgtctatgtctgcatctgttgctctcacttgttgcccttcttttcttccggcggcttcaggccctgaattagccaaatctatcaattccccggaaaatctagccggagaatgcaatgggaaacatttaccaatgattccaccggaggaagaggtcaaggacattaaaattgctaatggagtcactgcttttacccggaaacagaatccgtctgacagagtcaagaaagggtttgtcttggatgatcatgtgaaggattgggtcaagagaagagtggcttctggtgtttcagagtcgacatgtttccttccttttcttgttggtgccaagaaaatggttgattgtcttgtttgccataagccggtgtacccgggggaagacttatcgtgttctgttcgcggctgccaaggcgcttatcactcgctttgtgcgaaagaaagtcttggtttttctaagtcaagcaaatttaaatgccctcaacatgagtgctttgtctgcaagcaaagaacacaatggcggtgtgttaagtgtccaatggctgctcatgataaacattctccatggtcaaaagaaatacttcacttaaaagaccaaccaggaagagcagtttgttggaggcatccaactgattggcggctagacacaaagcatgcagttgcacagagtgagattgaggaagtcttttgccagttgcctttgccatatgtggaagaggagtttaagattgacttagcatggaaagattctgttgtgaaggaagatccgccttcttatgtgcacattagacgcaatatttacctcgttaagaaaaagcgtgataatgctaatgatggtgttgggtgcacaaattgtggccctaattgcgatagaagctgtgtttgcagggttcaatgcataagctgttcaaagggatgcagctgtcctgaaagttgtggaaacagaccattccgcaaagagaaaaagatcaaaattgttaagactgaacattgcggttggggagttgaggcagcagaatcaatcaacaaagaggacttcattgtcgaatacattggtgaagtgattagtgatgctcaatgtgagcaaaggctttgggatatgaaacacaaaggcatgaaagacttttacatgtgtgagattcaaaaagacttcacgattgatgctaccttcaaagggaacgcctctcggtttctgaaccacagttgcaacccaaactgtgtattggaaaagtggcaagttgaaggtgagacccgtgtgggtgtctttgcagctcgtcaaatagaagcaggagagccacttacatatgactacagatttgtgcagtttggtcctgaagtaaagtgcaattgtggttctgaaaactgtcaaggttatcttgggacaaagaggaaagaaccaaactgtttggttgtatcttggggagcaaaacgcagaagattgtttcaccgacctatagcccgtaaaccgcagcaagattagctgcaaaatatctataaacaatgtgctttgatagtttgtctgttgtcgttatctagtaatctctgtggagatatagaaccaatcgtgcttgtaaccgaagcttaggcccacaattgtataactgctagctgaagccacgggatagaccggtcggttataccatacattctttcagttccattac

SEQ ID NO: 32380 - protein, 497 aa, Arabidopsis thaliana
  misc_feature (1)..(497): Ceres Seq. ID no. 13592843
MLDLGNMSMSASVALTCCPSFLPAASGPELAKSINSPENLAGECNGKHLPMIPPEEEVKDIKIANGVTAFTRKQNPSDRVKKGFVLDDHVKDWVKRRVASGVSESTCFLPFLVGAKKMVDCLVCHKPVYPGEDLSCSVRGCQGAYHSLCAKESLGFSKSSKFKCPQHECFVCKQRTQWRCVKCPMAAHDKHSPWSKEILHLKDQPGRAVCWRHPTDWRLDTKHAVAQSEIEEVFCQLPLPYVEEEFKIDLAWKDSVVKEDPPSYVHIRRNIYLVKKKRDNANDGVGCTNCGPNCDRSCVCRVQCISCSKGCSCPESCGNRPFRKEKKIKIVKTEHCGWGVEAAESINKEDFIVEYIGEVISDAQCEQRLWDMKHKGMKDFYMCEIQKDFTIDATFKGNASRFLNHSCNPNCVLEKWQVEGETRVGVFAARQIEAGEPLTYDYRFVQFGPEVKCNCGSENCQGYLGTKRKEPNCLVVSWGAKRRRLFHRPIARKPQQD

SEQ ID NO: 32381 - protein, 491 aa, Arabidopsis thaliana
  misc_feature (1)..(491): Ceres Seq. ID no. 13592844
MSMSASVALTCCPSFLPAASGPELAKSINSPENLAGECNGKHLPMIPPEEEVKDIKIANGVTAFTRKQNPSDRVKKGFVLDDHVKDWVKRRVASGVSESTCFLPFLVGAKKMVDCLVCHKPVYPGEDLSCSVRGCQGAYHSLCAKESLGFSKSSKFKCPQHECFVCKQRTQWRCVKCPMAAHDKHSPWSKEILHLKDQPGRAVCWRHPTDWRLDTKHAVAQSEIEEVFCQLPLPYVEEEFKIDLAWKDSVVKEDPPSYVHIRRNIYLVKKKRDNANDGVGCTNCGPNCDRSCVCRVQCISCSKGCSCPESCGNRPFRKEKKIKIVKTEHCGWGVEAAESINKEDFIVEYIGEVISDAQCEQRLWDMKHKGMKDFYMCEIQKDFTIDATFKGNASRFLNHSCNPNCVLEKWQVEGETRVGVFAARQIEAGEPLTYDYRFVQFGPEVKCNCGSENCQGYLGTKRKEPNCLVVSWGAKRRRLFHRPIARKPQQD

SEQ ID NO: 32382 - protein, 489 aa, Arabidopsis thaliana
  misc_feature (1)..(489): Ceres Seq. ID no. 13592845
MSASVALTCCPSFLPAASGPELAKSINSPENLAGECNGKHLPMIPPEEEVKDIKIANGVTAFTRKQNPSDRVKKGFVLDDHVKDWVKRRVASGVSESTCFLPFLVGAKKMVDCLVCHKPVYPGEDLSCSVRGCQGAYHSLCAKESLGFSKSSKFKCPQHECFVCKQRTQWRCVKCPMAAHDKHSPWSKEILHLKDQPGRAVCWRHPTDWRLDTKHAVAQSEIEEVFCQLPLPYVEEEFKIDLAWKDSVVKEDPPSYVHIRRNIYLVKKKRDNANDGVGCTNCGPNCDRSCVCRVQCISCSKGCSCPESCGNRPFRKEKKIKIVKTEHCGWGVEAAESINKEDFIVEYIGEVISDAQCEQRLWDMKHKGMKDFYMCEIQKDFTIDATFKGNASRFLNHSCNPNCVLEKWQVEGETRVGVFAARQIEAGEPLTYDYRFVQFGPEVKCNCGSENCQGYLGTKRKEPNCLVVSWGAKRRRLFHRPIARKPQQD

SEQ ID NO: 32383 - DNA, 1254 bp, Arabidopsis thaliana
  misc_feature (1)..(1254): Ceres Seq. ID no. 13592855
attccatcaatttctcatccttgttgttttcttcttcttcttcttcctcttcttttatgtccatcgccgtcgaagtttctccggtaatggaagacatcacacggcagagcaaaaaaacttcggttgagaatgaaaccggcgatgatcagtcagcaacatcagtagtccttaaagctaaacgcaaacgccgatcgcaaccacgagacgctccaccccaacgtagctccgtccatagaggcgtcacaaggcatcgatggactggaaggtacgaagcacatttgtgggataagaatagttggaacgaaactcagaccaagaaaggaagacaagtatatttaggggcatatgacgaggaagatgcagcagcacgtgcctacgacttagcagcattgaaatattggggacgagacaccatcttgaacttccctttgtgtaattatgaagaagacatcaaagaaatggaaagccagtcaaaggaagagtatattggatctttgagaagaaaaagtagtgggttttcacgaggtgtatcaaaatacagaggcgttgcaaagcatcaccacaatgggagatgggaagctcgaatcggaagagtgtttggcaataaatatttataccttggaacttacgcgacgcaagaagaagcagctatagcgtacgatatcgcagctatcgagtaccgtggactcaacgccgttactaacttcgacatcagccgttatctgaaactcccggtgccggagaaccctatcgataccgcgaataatctcctcgagagtccgcattctgatcttagcccatttataaaacctaaccacgagtctgacttatcacagagtcaatcttcgtcagaggacaacgatgatcggaaaacaaagctcttgaagtcgtcacctttagtggcagaggaggtaatcggaccatcgacgccacctgagattgctccgcctcgtcggagcttcccggaagatatccagacgtatttcgggtgtcaaaactccggcaagttaacggcggaggaagatgatgttatcttcggtgatttagattctttccttacgcctgatttctacagcgagttaaatgattgctaaagtgttgttcttctgataagttttgttttttagttgttcagaatctcggttgtgaaaatcaacattgacacatcgattattctttcttgtgacaatcttatataataaagtttgaatctttctaaaaaaaaaaaaaaaaaagcttatcgataccgtcgac

SEQ ID NO: 32384 - protein, 363 aa, Arabidopsis thaliana
  misc_feature (1)..(363): Ceres Seq. ID no. 13592856
SINFSSLLFSSSSSSSSFMSIAVEVSPVMEDITRQSKKTSVENETGDDQSATSVVLKAKRKRRSQPRDAPPQRSSVHRGVTRHRWTGRYEAHLWDKNSWNETQTKKGRQVYLGAYDEEDAAARAYDLAALKYWGRDTILNFPLCNYEEDIKEMESQSKEEYIGSLRRKSSGFSRGVSKYRGVAKHHHNGRWEARIGRVFGNKYLYLGTYATQEEAAIAYDIAAIEYRGLNAVTNFDISRYLKLPVPENPIDTANNLLESPHSDLSPFIKPNHESDLSQSQSSSEDNDDRKTKLLKSSPLVAEEVIGPSTPPEIAPPRRSFPEDIQTYFGCQNSGKLTAEEDDVIFGDLDSFLTPDFYSELNDC

SEQ ID NO: 32385 - protein, 345 aa, Arabidopsis thaliana
  misc_feature (1)..(345): Ceres Seq. ID no. 13592857
MSIAVEVSPVMEDITRQSKKTSVENETGDDQSATSVVLKAKRKRRSQPRDAPPQRSSVHRGVTRHRWTGRYEAHLWDKNSWNETQTKKGRQVYLGAYDEEDAAARAYDLAALKYWGRDTILNFPLCNYEEDIKEMESQSKEEYIGSLRRKSSGFSRGVSKYRGVAKHHHNGRWEARIGRVFGNKYLYLGTYATQEEAAIAYDIAAIEYRGLNAVTNFDISRYLKLPVPENPIDTANNLLESPHSDLSPFIKPNHESDLSQSQSSSEDNDDRKTKLLKSSPLVAEEVIGPSTPPEIAPPRRSFPEDIQTYFGCQNSGKLTAEEDDVIFGDLDSFLTPDFYSELNDC

SEQ ID NO: 32386 - protein, 335 aa, Arabidopsis thaliana
  misc_feature (1)..(335): Ceres Seq. ID no. 13592858
MEDITRQSKKTSVENETGDDQSATSVVLKAKRKRRSQPRDAPPQRSSVHRGVTRHRWTGRYEAHLWDKNSWNETQTKKGRQVYLGAYDEEDAAARAYDLAALKYWGRDTILNFPLCNYEEDIKEMESQSKEEYIGSLRRKSSGFSRGVSKYRGVAKHHHNGRWEARIGRVFGNKYLYLGTYATQEEAAIAYDIAAIEYRGLNAVTNFDISRYLKLPVPENPIDTANNLLESPHSDLSPFIKPNHESDLSQSQSSSEDNDDRKTKLLKSSPLVAEEVIGPSTPPEIAPPRRSFPEDIQTYFGCQNSGKLTAEEDDVIFGDLDSFLTPDFYSELNDC

SEQ ID NO: 32387 - DNA, 1004 bp, Arabidopsis thaliana
  misc_feature (1)..(1004): Ceres Seq. ID no. 13592861
aggatttgctctagattgttgaatcgaagatgtcgacaagggaagagaatgtttacatggcgaaattagccgaacaagctgaacgttacgaagaaatggttgaattcatggagaaagttgcgaaaactgttgatgttgaggaactttcagttgaagagaggaatcttctctctgttgcttacaagaacgtgattggagcgagaagagcttcgtggagaatcatttcttcgattgagcagaaagaagagagcaaagggaacgaagatcatgttgctattatcaaggattacagaggaaagattgaatccgagcttagcaaaatctgtgatgggattttgaatgttcttgaagctcatcttattccttctgcttcaccagctgaatctaaagtgttttatcttaagatgaagggtgattatcataggtatcttgctgagtttaaggctggtgctgaaaggaaagaagctgctgaaagcactttggttgcttacaagtctgcttccgacattgccactgctgagttagctcctactcacccgataaggcttggtcttgcactcaacttctctgtgttttactatgaaatcctcaactcgcctgatcgtgcttgcagcctcgcaaagcaggcgtttgatgatgcaatcgctgagttagatacattgggtgaggaatcatacaaggacagtacactgattatgcagcttcttagagacaatctcactctctggacttcagatatgactgacgaagcaggagatgagattaaggaggcatcaaagcccgatggtgccgagtaaacccgaagaagaggaagagtcattttataatggtagaaaactttcatgtgataatctgagtgagggatagctcaggattcttataagagacacagttttattgttgtttgtttgttttgaaactacttgcgatttatcattcctcctttagcttcctcaatatttcctattctcctttctaatgaaatcaaaacttggttatttctg

SEQ ID NO: 32388 - protein, 255 aa, Arabidopsis thaliana
  misc_feature (1)..(255): Ceres Seq. ID no. 13592862
MSTREENVYMAKLAEQAERYEEMVEFMEKVAKTVDVEELSVEERNLLSVAYKNVIGARRASWRIISSIEQKEESKGNEDHVAIIKDYRGKIESELSKICDGILNVLEAHLIPSASPAESKVFYLKMKGDYHRYLAEFKAGAERKEAAESTLVAYKSASDIATAELAPTHPIRLGLALNFSVFYYEILNSPDRACSLAKQAFDDAIAELDTLGEESYKDSTLIMQLLRDNLTLWTSDMTDEAGDEIKEASKPDGAE

SEQ ID NO: 32389 - protein, 246 aa, Arabidopsis thaliana
  misc_feature (1)..(246): Ceres Seq. ID no. 13592863
MAKLAEQAERYEEMVEFMEKVAKTVDVEELSVEERNLLSVAYKNVIGARRASWRIISSIEQKEESKGNEDHVAIIKDYRGKIESELSKICDGILNVLEAHLIPSASPAESKVFYLKMKGDYHRYLAEFKAGAERKEAAESTLVAYKSASDIATAELAPTHPIRLGLALNFSVFYYEILNSPDRACSLAKQAFDDAIAELDTLGEESYKDSTLIMQLLRDNLTLWTSDMTDEAGDEIKEASKPDGAE

SEQ ID NO: 32390 - protein, 233 aa, Arabidopsis thaliana
  misc_feature (1)..(233): Ceres Seq. ID no. 13592864
MVEFMEKVAKTVDVEELSVEERNLLSVAYKNVIGARRASWRIISSIEQKEESKGNEDHVAIIKDYRGKIESELSKICDGILNVLEAHLIPSASPAESKVFYLKMKGDYHRYLAEFKAGAERKEAAESTLVAYKSASDIATAELAPTHPIRLGLALNFSVFYYEILNSPDRACSLAKQAFDDAIAELDTLGEESYKDSTLIMQLLRDNLTLWTSDMTDEAGDEIKEASKPDGAE

SEQ ID NO: 32391 - DNA, 694 bp, Arabidopsis thaliana
  misc_feature (1)..(694): Ceres Seq. ID no. 13592873
cataagtctctctcttacattttgaaaccctaatttctcaaaaaaatgtctgaagttgagtaccggtgctttgtcggcggccttgcctgggccaccaatgatgaagatcttcaaaggacgttctcacagttcggcgacgttatcgattctaagatcattaacgaccgcgagagtggaagatcaaggggattcggattcgtcaccttcaaggacgagaaagccatgagggatgcgattgaagagatgaacggtaaagagctcgatggacgtgtcatcaccgtgaacgaggctcagtcgagaggtagcggcggtggcggaggaggccgtggtggaagcggtggtggttaccgcagcggaggcggtggtggatactcaggaggcggtggcggcggatactcaggaggaggcggtggtggttacgagagacgtagcggaggttacggatctggtggaggcggtggtggccgaggatacggtggtggtggacgccgtgagggaggtggctacggaggcggtgatggtggaagttacggcggcggtggtggcggctggtaatcaaagatagagttgtttgcgtgctgctgctctgtttttggtttagatttggatttgtgtcaccacttctggtttggttatcgttcgtttggtttacttttttgatgaaacagttttatcgataccgtcgacctcgagg

SEQ ID NO: 32392 - protein, 169 aa, Arabidopsis thaliana
  misc_feature (1)..(169): Ceres Seq. ID no. 13592874
MSEVEYRCFVGGLAWATNDEDLQRTFSQFGDVIDSKIINDRESGRSRGFGFVTFKDEKAMRDAIEEMNGKELDGRVITVNEAQSRGSGGGGGGRGGSGGGYRSGGGGGYSGGGGGGYSGGGGGGYERRSGGYGSGGGGGGRGYGGGGRREGGGYGGGDGGSYGGGGGGW

SEQ ID NO: 32393 - protein, 110 aa, Arabidopsis thaliana
  misc_feature (1)..(110): Ceres Seq. ID no. 13592875
MRDAIEEMNGKELDGRVITVNEAQSRGSGGGGGGRGGSGGGYRSGGGGGYSGGGGGGYSGGGGGGYERRSGGYGSGGGGGGRGYGGGGRREGGGYGGGDGGSYGGGGGGW

SEQ ID NO: 32394 - protein, 103 aa, Arabidopsis thaliana
  misc_feature (1)..(103): Ceres Seq. ID no. 13592876
MNGKELDGRVITVNEAQSRGSGGGGGGRGGSGGGYRSGGGGGYSGGGGGGYSGGGGGGYERRSGGYGSGGGGGGRGYGGGGRREGGGYGGGDGGSYGGGGGGW

SEQ ID NO: 32395 - DNA, 1299 bp, Arabidopsis thaliana
  misc_feature (1)..(1299): Ceres Seq. ID no. 13592877
attacctagaacatcctaatcgaaaagagtgagagaagaagattagaaacgacgatatatacggagaatctcaggatttcgatcctgtttttgttttttctacttttggtactctccatggcgacggagcgtcatcattttgagcttgctaaaggcatcaatggccttgataagatcgttctccgcgagtctcgcggccgctctgcagaggtatacttgtatggaagtcatgtaacttcttggaagaatgagaacggagaggagttacttcacctcagtagcaaggccatattcaagcccccgaaaccaatacgtggagggattcccctatgttttccacaattcagtaactttggtacactcgaatcacatggctttgctagaaataggatctgggaagtcgaggctaacccacctccgttgccattaaattcttgttctagtgcttttgttgacctgatcctaaggccaactgaagacgatctgaaaatctggcctaacaattttgagttcaggctgaggatagccttggggaccgaaggagaattaactctgacatctcgtatcaggaacaccaactctgatggaaagccgtttacattcacatttgcttatcacacctatttctctgtctcagacatcagtgaagtacgggttgaaggattggaaacgttggattatcttgacaacttgaaggacagagaacgttttaccgaacaaggcgatgcgataacttttgaatccgaagttgacaagatttatctaagcacgccaacaaagattgctattttggatcacgagaaaaagaggactttcgttattcgcaaggacgggcttgctgatgctgtggtgtggaatccttgggataagaaatcaaagacgatctctgacttgggagatgaagactataagcatatgctttgtgtggaagctgcggctatcgagagaccgatcacattgaaacccggtgaagaatggaaaggaagactcgaactctctgcagttccttctagttactccagtggacagcttgaccccaagaaagtccttgagtgactctttcaaactccaaaaacagcatctttctcccctctttaattgcagtactataaagaaacgagtgaaggagagcttaaagatcatcggatatactatttaaagaaactgagatattgaataaaaattgttgcttcttagttctcttttgtaaccacagacaataacgatttgcgaactgcgaaccaagcatgcctggtctagcatttgtctggtcagagtccaaaaggaattacaactttt

SEQ ID NO: 32396 - protein, 312 aa, Arabidopsis thaliana
  misc_feature (1)..(312): Ceres Seq. ID no. 15221176
MATERHHFELAKGINGLDKIVLRESRGRSAEVYLYGSHVTSWKNENGEELLHLSSKAIFKPPKPIRGGIPLCFPQFSNFGTLESHGFARNRIWEVEANPPPLPLNSCSSAFVDLILRPTEDDLKIWPNNFEFRLRIALGTEGELTLTSRIRNTNSDGKPFTFTFAYHTYFSVSDISEVRVEGLETLDYLDNLKDRERFTEQGDAITFESEVDKIYLSTPTKIAILDHEKKRTFVIRKDGLADAVVWNPWDKKSKTISDLGDEDYKHMLCVEAAAIERPITLKPGEEWKGRLELSAVPSSYSSGQLDPKKVLE

SEQ ID NO: 32397 - DNA, 2716 bp, Arabidopsis thaliana
  misc_feature (1)..(2716): Ceres Seq. ID no. 13592888
atggagaagacacagatgcctgtagcccgagaagagaagatactggttctcgtgagattgaggcctctaaaccagaaagagattgccgctaatgaagctgcggattgggaatgtatcaatgataccaccatattgtacagaaacacattgcgcgaaggctcgaactttccttctgcatattcatttgataaagtctaccgaggtgaatgtcccaccagacaagtttacgaggatggaaccaaggaaatcgctctgtctgttgtcaaaggaatcaattgtagtattttcgcatatggccagacgagtagtggaaagacatacaccatgactggtattactgagtttgctgtggctgatatatttgactatatatttcagcatgaagaaagggcgttttccgtgaagttttcagctatagagatctacaatgaggccatacgagatctgcttagctcggatggtacatcactgaggctacgagacgatcctgagaaagggacagttgttgaaaaagccacagaggaaactctgcgagactggaaccatctgaaggaacttctatctatttgtgaaggtaaaactcaaaaaacatgttttctgaaaagtaaacttacatgcttctacattttcgcagcacagcgtaagataggtgaaacctcattgaatgagagaagttccagatctcatcaaatgatcagactgaatttcatcgatctagcaggaagcgagcgtgcttcacaagctatgtcagctggtacaagactcaaggaaggctgccatatcaatagaagtttgctgactcttggaacagtgatccgtaaacttagtaagggaagacaagggcacatcaactttagagactcgaagctcacacgaattctacagccatgcttggggggtaatgcaagaacagctatcatctgcactctgagcccagcaaggagtcatgtagagctaacgaagaacactctcttgtttgcgtgttgtgcaaaggaagtcaccacaaaggcgcggatcaatgttgttatgtcagacaaggctctgctaaagcaactacagcgtgagcttgcgaggctcgagactgagctgagaaaccctgcctcctcacctgcctcaaactgtgattgtgcaatgacggtgaggaagaaagatcttcagatacaaaagatggaaaaggagatcgcagagttgagaaaacagagggatcttgctcaatcccggcttgaagatttcatgagaatgattgaacacaatgtggcgtcaaagcctggaactccacatttcggcaaccacacagacaagtgggaggatggttcagtatcggagacatcaggcgtggtcgattcagacagaaggagttttatatcagatggaatgtctacaccgctgtcaatatcaagagcttatgttcattctcactctgacgatgatgatctggatgaagacttgcctaggcgttcggaagatctatcagaagaatattgcagagaagttcaatgcattgagactgaggaatcagtcacagtctataataacaagaaagacaagagagcagaacctgaaaacgttttaggctgtggtgaggatgctaatggtgaaacgagtgtaagccagaacgtcagggtgagaagttggaaccgcagagagactgtgtcaggcccgagcactccgcctgaaaacatagggacaggtttcctcggaagaccagagagtcacaagattgcgtttcctgatttagagttcggttctactgtatcgaggaatgattctatgtcttcttgcgggagcgattccacagggactcagagcatcagaacgccgttgggagaagagggtggtattactagtatccggactttcgttgaagggcttaaagagatggctaagcgtcaaggcgaggtctcaaatgctgaggattctggtaaaatgaggagggacattggtctggactccatggacagagaatttgagagacagcggcaagagattctggagctatggcaaacttgtaacatctctttggtgcatagaacatacttttacttgctcttcaaaggagatgaggcggattcaatctacatcggagtagagctaagaagacttttgtttatgaaagatagcttctctcagggaaaccaagcattggaaggaggagaaaccttaacattggcctcaagccggaaagagcttcacagggagagaaagatgctgagcaagcttgtggggaaaaggttttcaggagaagagaggaaaagaatctaccacaagtttgggattgcgattaactccaaacgcaggcggttacaacttgtgaatgagctctggagcaatcccaaggacatgactcaggttatggaaagcgcagatgttgtagcgaagcttgtgaggttcgctgagcaaggcagagccatgaaggagatgtttggtctgaccttcacacctccttcgttcttgacaactcggagatcgcatagttggagaaaaagcatgcctgcacttttctaacttctgtttggtccaatgacattttacttttgggtttcttgtagcagaagccatgtcttgtatatcttcttggtgtcatttcatttcctctgtcttttgatttttcaaaacagacaatgttgtaattgaatttttcttttccatcaaattcttttctttttacccgtaaaaattgttattaatgttatgaaaactcataatattttgaccc

SEQ ID NO: 32398 - protein, 834 aa, Arabidopsis thaliana
  misc_feature (1)..(834): Ceres Seq. ID no. 13592889
MEKTQMPVAREEKILVLVRLRPLNQKEIAANEAADWECINDTTILYRNTLREGSNFPSAYSFDKVYRGECPTRQVYEDGTKEIALSVVKGINCSIFAYGQTSSGKTYTMTGITEFAVADIFDYIFQHEERAFSVKFSAIEIYNEAIRDLLSSDGTSLRLRDDPEKGTVVEKATEETLRDWNHLKELLSICEGKTQKTCFLKSKLTCFYIFAAQRKIGETSLNERSSRSHQMIRLNFIDLAGSERASQAMSAGTRLKEGCHINRSLLTLGTVIRKLSKGRQGHINFRDSKLTRILQPCLGGNARTAIICTLSPARSHVELTKNTLLFACCAKEVTTKARINVVMSDKALLKQLQRELARLETELRNPASSPASNCDCAMTVRKKDLQIQKMEKEIAELRKQRDLAQSRLEDFMRMIEHNVASKPGTPHFGNHTDKWEDGSVSETSGVVDSDRRSFISDGMSTPLSISRAYVHSHSDDDDLDEDLPRRSEDLSEEYCREVQCIETEESVTVYNNKKDKRAEPENVLGCGEDANGETSVSQNVRVRSWNRRETVSGPSTPPENIGTGFLGRPESHKIAFPDLEFGSTVSRNDSMSSCGSDSTGTQSIRTPLGEEGGITSIRTFVEGLKEMAKRQGEVSNAEDSGKMRRDIGLDSMDREFERQRQEILELWQTCNISLVHRTYFYLLFKGDEADSIYIGVELRRLLFMKDSFSQGNQALEGGETLTLASSRKELHRERKMLSKLVGKRFSGEERKRIYHKFGIAINSKRRRLQLVNELWSNPKDMTQVMESADVVAKLVRFAEQGRAMKEMFGLTFTPPSFLTTRRSHSWRKSMPALF

SEQ ID NO: 32399 - protein, 829 aa, Arabidopsis thaliana
  misc_feature (1)..(829): Ceres Seq. ID no. 13592890
MPVAREEKILVLVRLRPLNQKEIAANEAADWECINDTTILYRNTLREGSNFPSAYSFDKVYRGECPTRQVYEDGTKEIALSVVKGINCSIFAYGQTSSGKTYTMTGITEFAVADIFDYIFQHEERAFSVKFSAIEIYNEAIRDLLSSDGTSLRLRDDPEKGTVVEKATEETLRDWNHLKELLSICEGKTQKTCFLKSKLTCFYIFAAQRKIGETSLNERSSRSHQMIRLNFIDLAGSERASQAMSAGTRLKEGCHINRSLLTLGTVIRKLSKGRQGHINFRDSKLTRILQPCLGGNARTAIICTLSPARSHVELTKNTLLFACCAKEVTTKARINVVMSDKALLKQLQRELARLETELRNPASSPASNCDCAMTVRKKDLQIQKMEKEIAELRKQRDLAQSRLEDFMRMIEHNVASKPGTPHFGNHTDKWEDGSVSETSGVVDSDRRSFISDGMSTPLSISRAYVHSHSDDDDLDEDLPRRSEDLSEEYCREVQCIETEESVTVYNNKKDKRAEPENVLGCGEDANGETSVSQNVRVRSWNRRETVSGPSTPPENIGTGFLGRPESHKIAFPDLEFGSTVSRNDSMSSCGSDSTGTQSIRTPLGEEGGITSIRTFVEGLKEMAKRQGEVSNAEDSGKMRRDIGLDSMDREFERQRQEILELWQTCNISLVHRTYFYLLFKGDEADSIYIGVELRRLLFMKDSFSQGNQALEGGETLTLASSRKELHRERKMLSKLVGKRFSGEERKRIYHKFGIAINSKRRRLQLVNELWSNPKDMTQVMESADVVAKLVRFAEQGRAMKEMFGLTFTPPSFLTTRRSHSWRKSMPALF

SEQ ID NO: 32400 - protein, 726 aa, Arabidopsis thaliana
  misc_feature (1)..(726): Ceres Seq. ID no. 13592891
MTGITEFAVADIFDYIFQHEERAFSVKFSAIEIYNEAIRDLLSSDGTSLRLRDDPEKGTVVEKATEETLRDWNHLKELLSICEGKTQKTCFLKSKLTCFYIFAAQRKIGETSLNERSSRSHQMIRLNFIDLAGSERASQAMSAGTRLKEGCHINRSLLTLGTVIRKLSKGRQGHINFRDSKLTRILQPCLGGNARTAIICTLSPARSHVELTKNTLLFACCAKEVTTKARINVVMSDKALLKQLQRELARLETELRNPASSPASNCDCAMTVRKKDLQIQKMEKEIAELRKQRDLAQSRLEDFMRMIEHNVASKPGTPHFGNHTDKWEDGSVSETSGVVDSDRRSFISDGMSTPLSISRAYVHSHSDDDDLDEDLPRRSEDLSEEYCREVQCIETEESVTVYNNKKDKRAEPENVLGCGEDANGETSVSQNVRVRSWNRRETVSGPSTPPENIGTGFLGRPESHKIAFPDLEFGSTVSRNDSMSSCGSDSTGTQSIRTPLGEEGGITSIRTFVEGLKEMAKRQGEVSNAEDSGKMRRDIGLDSMDREFERQRQEILELWQTCNISLVHRTYFYLLFKGDEADSIYIGVELRRLLFMKDSFSQGNQALEGGETLTLASSRKELHRERKMLSKLVGKRFSGEERKRIYHKFGIAINSKRRRLQLVNELWSNPKDMTQVMESADVVAKLVRFAEQGRAMKEMFGLTFTPPSFLTTRRSHSWRKSMPALF

SEQ ID NO: 32401 - DNA, 810 bp, Arabidopsis thaliana
  misc_feature (1)..(810): Ceres Seq. ID no. 13592949
caattctctttaacattctccttgatttctgacactaccctcatcgggtctccaagaggccaagaaagacctctttctcggcttctaggagtctcatcattctcttttttcacatttgcttcctccacacgcaacctccaaaaagccctaaatttattaaaacaaatggattccacggagctgaaccgtgtgttccaaatgttcgacaaggacggagacgggaagatcactacgaaggagctgaacgagtcattcaagaacctcggtatcataatacccgaagacgaactaacacaaattatccaaaagatcgatgttaatggtgacggttgtgttgacattgaagagtttggagagctctacaagacgataatggtagaagatgaggacgaggtaggagaagaagatatgaaggaagcgttcaacgtatttgatcggaacggagatgggtttataacggtggatgaattgaaagcggttttatcttccttgggactcaagcaaggtaagaccttggaggaatgtaggaagatgataatgcaagtggatgttgatggtgatggtagggttaattacatggagtttagacaaatgatgaaaaagggtcgcttttttagctctttgagctgataataactttttttcttctttttttaccttctcttgtttttaattttggttatttgcttaaccattttctcttgcggtctaaatggaaaatacatgatcatagactaattattttatcttcaagacatgcgagagcacattgtaaaaaaaaaaaaaaaaaagcttatcgataccgtcgac

SEQ ID NO: 32402 - protein, 209 aa, Arabidopsis thaliana
  misc_feature (1)..(209): Ceres Seq. ID no. 13592950
QFSLTFSLISDTTLIGSPRGQERPLSRLLGVSSFSFFTFASSTRNLQKALNLLKQMDSTELNRVFQMFDKDGDGKITTKELNESFKNLGIIIPEDELTQIIQKIDVNGDGCVDIEEFGELYKTIMVEDEDEVGEEDMKEAFNVFDRNGDGFITVDELKAVLSSLGLKQGKTLEECRKMIMQVDVDGDGRVNYMEFRQMMKKGRFFSSLS

SEQ ID NO: 32403 - protein, 154 aa, Arabidopsis thaliana
  misc_feature (1)..(154): Ceres Seq. ID no. 13592951
MDSTELNRVFQMFDKDGDGKITTKELNESFKNLGIIIPEDELTQIIQKIDVNGDGCVDIEEFGELYKTIMVEDEDEVGEEDMKEAFNVFDRNGDGFITVDELKAVLSSLGLKQGKTLEECRKMIMQVDVDGDGRVNYMEFRQMMKKGRFFSSLS

SEQ ID NO: 32404 - protein, 143 aa, Arabidopsis thaliana
  misc_feature (1)..(143): Ceres Seq. ID no. 13592952
MFDKDGDGKITTKELNESFKNLGIIIPEDELTQIIQKIDVNGDGCVDIEEFGELYKTIMVEDEDEVGEEDMKEAFNVFDRNGDGFITVDELKAVLSSLGLKQGKTLEECRKMIMQVDVDGDGRVNYMEFRQMMKKGRFFSSLS

SEQ ID NO: 32405 - DNA, 1601 bp, Arabidopsis thaliana
  misc_feature (1)..(1601): Ceres Seq. ID no. 13592957
actttaagctcttcttcactcacactctctcaaaaatcaccaaacgaaactcttcactctctccaacaatggccaagaagatgagttctctcatcatcatcttcaacattctccttctcctcacaactcaaacccacgcgcacaacgtcacgcgcctcctagcaaaccacccatcattctcttccttcagccatttcctaacacaaacacacctcgccgacgaaatcaaccggagaagaaccataaccgtttgcgcagtagataacgccgccatgtcagcattaacctctaaaggctatacactctcaactctcaaaaacattctctccctccacgtccttttagattacttcggaaccaaaaaactccaccagatccgtgacggctctgctctcgccgctactctgtttcaagccaccggagctgctcctggaacctcaggattcgttaacataacggatctgagaggtggtaaagttgggtttggtcctgacggtggagatctgtcttctttctttgttaaatctattgaagaagttccgtataacatctccattattcagatcagtagagttttaccgtcggagactgcggcggctccgactcctgctccggcggagatgaatcttaccggaataatgtcggctcatggatgcaaagtgtttgctgagactcttctcactaaccctggagcttcaaaaacctatcaggagagtttagaaggaggcatgacagtgttctgtccaggagatgatgcaatgaaaggtttcttgcccaaatacaagaacttgacagctccaaagaaagaagcatttctcgatttcctcgctgtcccgacatattactcaatggcgatgctcaaatccaacaatggtccgatgaacacacttgcgacagatggagctaacaagtttgagcttactgtacagaacgatggagagaaggttaccctcaagacaaggatcaacactgtcaagatcgttgatactcttattgatgagcagcctttagctatatatgcgactgataaggttttgttgcctaaagagttgtttaaggcttcggctgttgaagctccggctcctgctccggcaccagaggatggtgatgttgcggattctccaaaagcggctaaagggaaagcgaaaggaaagaagaagaaggctgcaccgtcgccagataatgatccttttggtgactcggattcgcctgccgaagggcctgacggagaggccgatgatgcgacggcagatgatgcttgtgcggttaggatcatcggaggagctaaggctggtttggtggtgagcttgctctgcttgtttgcttcttcttggcttctatagtttcacttcttgtttcttcgattcttccatgttttttttttttttgtgaatcttttatttatggtttttgggggagagtaaatgaggattatttatttccctctattgttgagtttttttatttatttaaaagttggttgtcgaattaaatagtcggtagtttatatatttgtgtgttcttgtttcacgtgtttgtttagttgatgatgtaaacaagtcctgattttggtgatcttgtcatatttttcttgtttttgt

SEQ ID NO: 32406 - protein, 446 aa, Arabidopsis thaliana
  misc_feature (1)..(446): Ceres Seq. ID no. 13592958
FKLFFTHTLSKITKRNSSLSPTMAKKMSSLIIIFNILLLLTTQTHAHNVTRLLANHPSFSSFSHFLTQTHLADEINRRRTITVCAVDNAAMSALTSKGYTLSTLKNILSLHVLLDYFGTKKLHQIRDGSALAATLFQATGAAPGTSGFVNITDLRGGKVGFGPDGGDLSSFFVKSIEEVPYNISIIQISRVLPSETAAAPTPAPAEMNLTGIMSAHGCKVFAETLLTNPGASKTYQESLEGGMTVFCPGDDAMKGFLPKYKNLTAPKKEAFLDFLAVPTYYSMAMLKSNNGPMNTLATDGANKFELTVQNDGEKVTLKTRINTVKIVDTLIDEQPLAIYATDKVLLPKELFKASAVEAPAPAPAPEDGDVADSPKAAKGKAKGKKKKAAPSPDNDPFGDSDSPAEGPDGEADDATADDACAVRIIGGAKAGLVVSLLCLFASSWLL

SEQ ID NO: 32407 - protein, 424 aa, Arabidopsis thaliana
  misc_feature (1)..(424): Ceres Seq. ID no. 13592959
MAKKMSSLIIIFNILLLLTTQTHAHNVTRLLANHPSFSSFSHFLTQTHLADEINRRRTITVCAVDNAAMSALTSKGYTLSTLKNILSLHVLLDYFGTKKLHQIRDGSALAATLFQATGAAPGTSGFVNITDLRGGKVGFGPDGGDLSSFFVKSIEEVPYNISIIQISRVLPSETAAAPTPAPAEMNLTGIMSAHGCKVFAETLLTNPGASKTYQESLEGGMTVFCPGDDAMKGFLPKYKNLTAPKKEAFLDFLAVPTYYSMAMLKSNNGPMNTLATDGANKFELTVQNDGEKVTLKTRINTVKIVDTLIDEQPLAIYATDKVLLPKELFKASAVEAPAPAPAPEDGDVADSPKAAKGKAKGKKKKAAPSPDNDPFGDSDSPAEGPDGEADDATADDACAVRIIGGAKAGLVVSLLCLFASSWLL

SEQ ID NO: 32408 - protein, 420 aa, Arabidopsis thaliana
  misc_feature (1)..(420): Ceres Seq. ID no. 13592960
MSSLIIIFNILLLLTTQTHAHNVTRLLANHPSFSSFSHFLTQTHLADEINRRRTITVCAVDNAAMSALTSKGYTLSTLKNILSLHVLLDYFGTKKLHQIRDGSALAATLFQATGAAPGTSGFVNITDLRGGKVGFGPDGGDLSSFFVKSIEEVPYNISIIQISRVLPSETAAAPTPAPAEMNLTGIMSAHGCKVFAETLLTNPGASKTYQESLEGGMTVFCPGDDAMKGFLPKYKNLTAPKKEAFLDFLAVPTYYSMAMLKSNNGPMNTLATDGANKFELTVQNDGEKVTLKTRINTVKIVDTLIDEQPLAIYATDKVLLPKELFKASAVEAPAPAPAPEDGDVADSPKAAKGKAKGKKKKAAPSPDNDPFGDSDSPAEGPDGEADDATADDACAVRIIGGAKAGLVVSLLCLFASSWLL

SEQ ID NO: 32409 - DNA, 1259 bp, Arabidopsis thaliana
  misc_feature (1)..(1259): Ceres Seq. ID no. 13592961
agattctcatgtgttgatgaaactagttagcctctttttatctactctttttgtcactatcataagctcggaatcgcagtgccggaacttcgagtcgatcatcagtttcggtgattcgattgccgacactggaaacttgctcggtctctcagatcataacaatcttcctatgagcgcgtttccaccgtacggagaaactttcttccaccacccaaccggtcgtttctcagacggtcgcctcattattgacttcatcgctgaatttttggggcttccttatgtgcctccttacttcggatctacaaatggaaactttgagaaaggagttaattttgccgtagcctcagcaactgcattggaaagttctttcttagaagagagaggataccattgtcctcacaacatcagtttaggagttcagcttaacatcttcaaggagagtttaccaaatctatgtggcttaccatcagattgtagagatatgattggaaatggtttgattctcatgggagagattggagctaatgattacaatttcccattcttccaactcagacccttggacgaggtcaaagagctcgttccattggtgattaatacgatatcttctgcaatcacggagttgattggtatgggaggaagaacatttctggtgcccggagggttccctctcggatgctcagtagcatttttgacattacaccaaacatcaaacatggaagaatatgatcctttaacaggatgtttgaaatggctgaacaagtttggagaataccacagtgagcggcttcaggaagaactcaacagactcaggaagcttaaccctcacgtcaacatcatatatgctgactactacaatgcttcattgcgccttggccgagaaccaagtaaatacggattcataaacagacacttgtcagcttgttgcggtgtaggagggccgtacaacttcaacttaagtagaagttgtgggagtgtaggagtggaagcttgtagtgatccttcaaagtatgtggcctgggatggccttcatatgactgaggctgcacacaaatcgatggctgatggattagtcaaaggaccatatgcgattcctcctttcgattggtcatgtctcagctcaatgattaagaagaaggaagtcgttggaaacacaatattctttgatgaatagtagacacaagctaagttgatttcaaaatgtaaaatatctgaataaaaagatctaaggataaaaaatttctaataataaccaattt

SEQ ID NO: 32410 - protein, 390 aa, Arabidopsis thaliana
  misc_feature (1)..(390): Ceres Seq. ID no. 13592962
DSHVLMKLVSLFLSTLFVTIISSESQCRNFESIISFGDSIADTGNLLGLSDHNNLPMSAFPPYGETFFHHPTGRFSDGRLIIDFIAEFLGLPYVPPYFGSTNGNFEKGVNFAVASATALESSFLEERGYHCPHNISLGVQLNIFKESLPNLCGLPSDCRDMIGNGLILMGEIGANDYNFPFFQLRPLDEVKELVPLVINTISSAITELIGMGGRTFLVPGGFPLGCSVAFLTLHQTSNMEEYDPLTGCLKWLNKFGEYHSERLQEELNRLRKLNPHVNIIYADYYNASLRLGREPSKYGFINRHLSACCGVGGPYNFNLSRSCGSVGVEACSDPSKYVAWDGLHMTEAAHKSMADGLVKGPYAIPPFDWSCLSSMIKKKEVVGNTIFFDE

SEQ ID NO: 32411 - protein, 385 aa, Arabidopsis thaliana
  misc_feature (1)..(385): Ceres Seq. ID no. 13592963
MKLVSLFLSTLFVTIISSESQCRNFESIISFGDSIADTGNLLGLSDHNNLPMSAFPPYGETFFHHPTGRFSDGRLIIDFIAEFLGLPYVPPYFGSTNGNFEKGVNFAVASATALESSFLEERGYHCPHNISLGVQLNIFKESLPNLCGLPSDCRDMIGNGLILMGEIGANDYNFPFFQLRPLDEVKELVPLVINTISSAITELIGMGGRTFLVPGGFPLGCSVAFLTLHQTSNMEEYDPLTGCLKWLNKFGEYHSERLQEELNRLRKLNPHVNIIYADYYNASLRLGREPSKYGFINRHLSACCGVGGPYNFNLSRSCGSVGVEACSDPSKYVAWDGLHMTEAAHKSMADGLVKGPYAIPPFDWSCLSSMIKKKEVVGNTIFFDE

SEQ ID NO: 32412 - protein, 334 aa, Arabidopsis thaliana
  misc_feature (1)..(334): Ceres Seq. ID no. 13592964
MSAFPPYGETFFHHPTGRFSDGRLIIDFIAEFLGLPYVPPYFGSTNGNFEKGVNFAVASATALESSFLEERGYHCPHNISLGVQLNIFKESLPNLCGLPSDCRDMIGNGLILMGEIGANDYNFPFFQLRPLDEVKELVPLVINTISSAITELIGMGGRTFLVPGGFPLGCSVAFLTLHQTSNMEEYDPLTGCLKWLNKFGEYHSERLQEELNRLRKLNPHVNIIYADYYNASLRLGREPSKYGFINRHLSACCGVGGPYNFNLSRSCGSVGVEACSDPSKYVAWDGLHMTEAAHKSMADGLVKGPYAIPPFDWSCLSSMIKKKEVVGNTIFFDE

SEQ ID NO: 32413 - DNA, 1146 bp, Arabidopsis thaliana
  misc_feature (1)..(1146): Ceres Seq. ID no. 13592985
aagttttaacggacgcgagaaatcacagaggaagcgaagtcagtgtagagatatctaattgcgatggcttttttgagtaaattcgggaacatattgaagcagaccacaaacaagcaactcaatgctcaggtttctttatcaagcccttcgctttttcaagcaataaggtgtatgtcatcttctaagctctttattggaggtatggcttatagcatggatgaggatagcttaagagaagctttcaccaaatacggtgaagttgtcgatactagagttattttggatcgtgaaactggtaggtcaaggggatttggatttgttacattcacctcttcagaagcggcatctagtgctatccaggctttggatggccgggatctccatggccgggttgttaaagtaaactatgcaaatgatagaacaagtggtggtggttttggaggtggtggctatggaggcggtggtggtggttatggtggtagtggtggctacggaggaggtgctggtggctacggaggaagtggtggctatggaggcggtgctggtggctacggaggtaattctggtggtggctacggaggtaatgctgctggtggatatggaggcagtggtgctggtggctatggaggcgatgctactggtcacggaggtgctggtggaggttatggttcaagcggtggctttggatctagcggcaacacttatggggagggttcaagtgcaagcgcaggtgctgttggtgactataatggaagtagtggttatggtagcgccaatacttatggtagcagcaatggtggattcgctggagacagccagtttggaggaagccctgttggcaacagctctcagttcggtggtgacaatacccagtttactgctggtggccaatttggcggtgaggatcaatttggaagcatggagaaaagtgaaacgaagatggaagatggaccaataggtggagaattcgaagatgttgccaaaagagcttgaaggaactagcaaaaaatgttgtcaagactgtcttttcatattaaatcctatgattagtagtagctagctattctacattgcttcctgaattaaacactttatcaagaaacaatctgcttttgctatctttgaaaataatttgtagctcaattt

SEQ ID NO: 32414 - protein, 309 aa, Arabidopsis thaliana
  misc_feature (1)..(309): Ceres Seq. ID no. 13592986
MAFLSKFGNILKQTTNKQLNAQVSLSSPSLFQAIRCMSSSKLFIGGMAYSMDEDSLREAFTKYGEVVDTRVILDRETGRSRGFGFVTFTSSEAASSAIQALDGRDLHGRVVKVNYANDRTSGGGFGGGGYGGGGGGYGGSGGYGGGAGGYGGSGGYGGGAGGYGGNSGGGYGGNAAGGYGGSGAGGYGGDATGHGGAGGGYGSSGGFGSSGNTYGEGSSASAGAVGDYNGSSGYGSANTYGSSNGGFAGDSQFGGSPVGNSSQFGGDNTQFTAGGQFGGEDQFGSMEKSETKMEDGPIGGEFEDVAKRA

SEQ ID NO: 32415 - protein, 273 aa, Arabidopsis thaliana
  misc_feature (1)..(273): Ceres Seq. ID no. 13592987
MSSSKLFIGGMAYSMDEDSLREAFTKYGEVVDTRVILDRETGRSRGFGFVTFTSSEAASSAIQALDGRDLHGRVVKVNYANDRTSGGGFGGGGYGGGGGGYGGSGGYGGGAGGYGGSGGYGGGAGGYGGNSGGGYGGNAAGGYGGSGAGGYGGDATGHGGAGGGYGSSGGFGSSGNTYGEGSSASAGAVGDYNGSSGYGSANTYGSSNGGFAGDSQFGGSPVGNSSQFGGDNTQFTAGGQFGGEDQFGSMEKSETKMEDGPIGGEFEDVAKRA

SEQ ID NO: 32416 - protein, 263 aa, Arabidopsis thaliana
  misc_feature (1)..(263): Ceres Seq. ID no. 13592988
MAYSMDEDSLREAFTKYGEVVDTRVILDRETGRSRGFGFVTFTSSEAASSAIQALDGRDLHGRVVKVNYANDRTSGGGFGGGGYGGGGGGYGGSGGYGGGAGGYGGSGGYGGGAGGYGGNSGGGYGGNAAGGYGGSGAGGYGGDATGHGGAGGGYGSSGGFGSSGNTYGEGSSASAGAVGDYNGSSGYGSANTYGSSNGGFAGDSQFGGSPVGNSSQFGGDNTQFTAGGQFGGEDQFGSMEKSETKMEDGPIGGEFEDVAKRA

SEQ ID NO: 32417 - DNA, 1840 bp, Arabidopsis thaliana
  misc_feature (1)..(1840): Ceres Seq. ID no. 13592995
aagcacagcaaataatatcagaacacatttttttctttttataatttaatcaattaaatcaccaaactcaattaaataaaaagaaaaaattattattatcccttcttcttcttcttcttcgtcttcgtctttgattctcctgattcatgtcgcttaaatttttagcgatcttcgaatcccattttccttcgggaatctgacattttttctcgggaaattttttacccaaatcggagtaaagtatcgaatctagagaatccgctatggatgagacctattttgatctattgaatttctttaagaatccctcttttacagagacatttgtcgacatcttactatgcgcagttccgatttggctcgccgttatgatcgggttattaatcggatggtcttggcgtccaagatggaccggtttgatctatttagggtttcgttctaagcttcggtttttatggaccgcaccgcctgggtttggtgctcgtcggctttggcttgctttcaccgctctctctgctttctccgtttgccgaaccatctggtcaaggaatgacaccagagctaataaatcggcgaccggttcagcttcgtcgcagacgcctgttgaggataatgatgaatcaggattggcctcaagaggtagcgataacgggacggtgacagaggatattgtgacagagaatgatttagagcatctgcttcagctgcttgaagttggaaatgcagctttggaatggcaatctatgatggataagactactccaaatatgagctaccaggcttggcgtcatgagcctgagacaggtcctgttatttatcgcagccggactgtgtttgaggatgcaactccagatattgttagggatttcttctgggatgatgagtttcgacctaaatgggatttcatgcttgccaacttcaaaacgttggaggaggacactcagacaggaacaatgattgttcagtggagaaaaaagtttccttttttctgtagtgaccgagagtatatcattggccggagaatatgggagtctgggaagaagtattattgtgtcacaaagggagttccttatccagctctaccaaagcgtgataagccaaggcgtgttgagctttatttctcaagttgggttatcagagcggttgaatcccgaaaaggagatggacagcaaacggcttgtgaagtttcccttgtccactacgaagacatgggcatcccaaaagacgtagcaaagttaggtgtccgtcatggcatgtggggagctgtcaagaagctaaactccggtttacgagcgtaccaatccgccagaaaatcagactcatctctatctcggatcgcccaaatggcaagaatctctacaaaactgaacatgaattctgcagaatcatcttcaagagatgaagacagaagcagagcaatggaatatgcgagacaacgggaccatttgagaatggactggaaatgggttgttgtaggaggtgtcgcattggcttgtggcctacactctgggatcattggcaaggctttactggctggagctggccagagactggctcgtaggtgagaaaccttgtattcttattatatcttcccttgacagaaaagagaaacatatgcatataactaagggaaatgtattatttttgcaactcctctgagaagggcatgtggttttggtggtgaaccatgtagagtagtagctttaaactatggagtcataagttatttgagttctatcttgtaccacaggatagtgagatatgtattttataaactatatgaatctacatagcttctaaaagcttaaattctttgcatgtgatgcacttcgtatctccc

SEQ ID NO: 32418 - protein, 433 aa, Arabidopsis thaliana
  misc_feature (1)..(433): Ceres Seq. ID no. 15221190
MDETYFDLLNFFKNPSFTETFVDILLCAVPIWLAVMIGLLIGWSWRPRWTGLIYLGFRSKLRFLWTAPPGFGARRLWLAFTALSAFSVCRTIWSRNDTRANKSATGSASSQTPVEDNDESGLASRGSDNGTVTEDIVTENDLEHLLQLLEVGNAALEWQSMMDKTTPNMSYQAWRHEPETGPVIYRSRTVFEDATPDIVRDFFWDDEFRPKWDFMLANFKTLEEDTQTGTMIVQWRKKFPFFCSDREYIIGRRIWESGKKYYCVTKGVPYPALPKRDKPRRVELYFSSWVIRAVESRKGDGQQTACEVSLVHYEDMGIPKDVAKLGVRHGMWGAVKKLNSGLRAYQSARKSDSSLSRIAQMARISTKLNMNSAESSSRDEDRSRAMEYARQRDHLRMDWKWVVVGGVALACGLHSGIIGKALLAGAGQRLARR

SEQ ID NO: 32419 - protein, 398 aa, Arabidopsis thaliana
  misc_feature (1)..(398): Ceres Seq. ID no. 15221191
MIGLLIGWSWRPRWTGLIYLGFRSKLRFLWTAPPGFGARRLWLAFTALSAFSVCRTIWSRNDTRANKSATGSASSQTPVEDNDESGLASRGSDNGTVTEDIVTENDLEHLLQLLEVGNAALEWQSMMDKTTPNMSYQAWRHEPETGPVIYRSRTVFEDATPDIVRDFFWDDEFRPKWDFMLANFKTLEEDTQTGTMIVQWRKKFPFFCSDREYIIGRRIWESGKKYYCVTKGVPYPALPKRDKPRRVELYFSSWVIRAVESRKGDGQQTACEVSLVHYEDMGIPKDVAKLGVRHGMWGAVKKLNSGLRAYQSARKSDSSLSRIAQMARISTKLNMNSAESSSRDEDRSRAMEYARQRDHLRMDWKWVVVGGVALACGLHSGIIGKALLAGAGQRLARR

SEQ ID NO: 32420 - protein, 273 aa, Arabidopsis thaliana
  misc_feature (1)..(273): Ceres Seq. ID no. 15221192
MMDKTTPNMSYQAWRHEPETGPVIYRSRTVFEDATPDIVRDFFWDDEFRPKWDFMLANFKTLEEDTQTGTMIVQWRKKFPFFCSDREYIIGRRIWESGKKYYCVTKGVPYPALPKRDKPRRVELYFSSWVIRAVESRKGDGQQTACEVSLVHYEDMGIPKDVAKLGVRHGMWGAVKKLNSGLRAYQSARKSDSSLSRIAQMARISTKLNMNSAESSSRDEDRSRAMEYARQRDHLRMDWKWVVVGGVALACGLHSGIIGKALLAGAGQRLARR

SEQ ID NO: 32421 - DNA, 1008 bp, Arabidopsis thaliana
  misc_feature (1)..(1008): Ceres Seq. ID no. 13592999
gttgattcagtctcactcttgctcagtagagctcccatcaatggcttcaatcaacctcttcctcttcgctttccttcttcttctctctcacgcttcagcttcaacggtaatcttctacaacaaatgcaaacacccagtttggccaggtatccaacccagcgccggtcaaaacttactcgccggcggtggttttaagcttccagctaacaaagcccactctcttcaactcccaccactctggtccggccgtttctggggtcgccacggctgcaccttcgacagatctggccgtggtcactgcgccaccggagattgcggcggttctctctcctgcaacggtgccggcggtgaacctccggccactctcgccgaaatcactctcggccctgagctagacttctatgacgtcagcctcgtcgacggttataacctggccatgtcgattatgccggttaaaggttcaggtcaatgtagctacgccggttgtgttagcgatctaaaccagatgtgtccggttggtttacaagtccggtcacgtaacgggaaacgtgtagtagcctgtaaaagtgcttgctctgccttcaattcaccacagtactgttgcaccggcttgttcggtaacccacagtcttgcaaaccaacggcttactccaaaatcttcaaagtcgcttgcccaaaagcttactcttatgcttacgacgacccaaccagtatcgccacatgttccaaggctaactacatcgtcaccttttgccctcatcatcgccattaaattagccagtaaagaagaagaaacatttctctattagcaacaaactcttgtcatgtttcgaattcttgagtttctatatctacttttgtaacactatgattgaatgcagatcctattatcaatatcaatggaactcaaccaacttagtgatgtgtcttgtgagtgttaatctccaaattctaaatccttttatgttcagtggcttatgtactagacaatgcaagattaatgctatt

SEQ ID NO: 32422 - protein, 256 aa, Arabidopsis thaliana
  misc_feature (1)..(256): Ceres Seq. ID no. 13593000
LIQSHSCSVELPSMASINLFLFAFLLLLSHASASTVIFYNKCKHPVWPGIQPSAGQNLLAGGGFKLPANKAHSLQLPPLWSGRFWGRHGCTFDRSGRGHCATGDCGGSLSCNGAGGEPPATLAEITLGPELDFYDVSLVDGYNLAMSIMPVKGSGQCSYAGCVSDLNQMCPVGLQVRSRNGKRVVACKSACSAFNSPQYCCTGLFGNPQSCKPTAYSKIFKVACPKAYSYAYDDPTSIATCSKANYIVTFCPHHRH

SEQ ID NO: 32423 - protein, 243 aa, Arabidopsis thaliana
  misc_feature (1)..(243): Ceres Seq. ID no. 13593001
MASINLFLFAFLLLLSHASASTVIFYNKCKHPVWPGIQPSAGQNLLAGGGFKLPANKAHSLQLPPLWSGRFWGRHGCTFDRSGRGHCATGDCGGSLSCNGAGGEPPATLAEITLGPELDFYDVSLVDGYNLAMSIMPVKGSGQCSYAGCVSDLNQMCPVGLQVRSRNGKRVVACKSACSAFNSPQYCCTGLFGNPQSCKPTAYSKIFKVACPKAYSYAYDDPTSIATCSKANYIVTFCPHHRH

SEQ ID NO: 32424 - DNA, 684 bp, Arabidopsis thaliana
  misc_feature (1)..(684): Ceres Seq. ID no. 13593010
gcgttatacttaaaacactctcctcttcttttccttgtccttctctatcgcttctataaactttttcgatctaaggttcgtgatctccttcttctctacgaagtttacactttttcttcaaaggaaacaatgagccagtacaatcaacctcccgttggtgttcctcctcctcaaggttatccaccggagggatatccaaaagatgcttatccaccacaaggatatcctcctcagggatatcctcagcaaggctatccacctcagggatatcctcaacaaggttatcctcagcaaggatatcctccaccgtacgcgcctcaatatcctccaccaccgcagcatcagcaacaacagagcagtcctggctttctagaaggatgtcttgctgctctgtgttgttgctgtctcttggatgcttgcttctgattggagtctctctctctctgcataaagcttcgggatttatttgtaagagggttttggttaaacaaaaaccttaattgatttgtggggcattaaaaatgaatctctcgatgattctctttcgttttatgtgtaatgttcttcggttcataacattttaactattgtctatcgacgttctgccttagtttgtatttgattatgggaatgtaaattggttgggagacactattctatgccatagtttattgcttggatctt

SEQ ID NO: 32425 - protein, 141 aa, Arabidopsis thaliana
  misc_feature (1)..(141): Ceres Seq. ID no. 13593011
ALYLKHSPLLFLVLLYRFYKLFRSKVRDLLLLYEVYTFSSKETMSQYNQPPVGVPPPQGYPPEGYPKDAYPPQGYPPQGYPQQGYPPQGYPQQGYPQQGYPPPYAPQYPPPPQHQQQQSSPGFLEGCLAALCCCCLLDACF

SEQ ID NO: 32426 - protein, 98 aa, Arabidopsis thaliana
  misc_feature (1)..(98): Ceres Seq. ID no. 13593012
MSQYNQPPVGVPPPQGYPPEGYPKDAYPPQGYPPQGYPQQGYPPQGYPQQGYPQQGYPPPYAPQYPPPPQHQQQQSSPGFLEGCLAALCCCCLLDACF

SEQ ID NO: 32427 - DNA, 1631 bp, Arabidopsis thaliana
  misc_feature (1)..(1631): Ceres Seq. ID no. 13593017
acacacgagaaagaaaaagctcacaactttaacctttctggagagagaagaacaaaagagggagagggagagaaatggaaggcaaagaagaagatgtacgagtgggagctaacaagttcccggagaggcaacccatcggtacatcggctcagtccaccgacaaggactacaaagagccacctcctgcgccactgttcgagcccggcgagctcagctcatggtctttctacagagccggaatagctgagtttatcgctactttcttgtttctctacatcactgttttgactgtaatgggagttaagagagcaccaaacatgtgtgcttctgttggaatccaaggtatcgcttgggcttttggtggcatgatctttgctcttgtctactgtactgctggaatttcaggtggacacatcaaccctgctgtaacattcggtctgttcttggctcggaagttatctctgaccagagcagtgttctacatgattatgcaatgtcttggagccatctgtggtgccggagtcgtcaaaggtttccagccaacgccgtaccagactctcggtggtggtgctaacaccgttgctcatggctacaccaaaggttctggccttggtgctgaaatcatcggaacattcgttctcgtctacactgtcttctccgccaccgacgccaagagaagcgcccgtgactcacacgtcccgattttggcgccgctcccaatcggatttgcagtgttcttggtacacttggcaacaataccgatcaccgggaccggaatcaacccagctagaagtcttggagccgcaattatctacaacaaggaccactcttgggatgaccattggattttctgggttggaccattcattggagcagctctagcagcactatatcaccagattgtcatcagagcgattcctttcaagagcaagagttagagacacacagaaagattccacggtccagaatttgttctttagtagtttctttgcttatctatctaatgtagcttgtgttttgcaatgtaatgagcctttcaagaatatgtatttgggatttctaatcagcttttgtctatgtaaaaactatgtgtttcttttttcttcctatactcgtctcagatgctttatggcaaagggtctctgaagtctaaggtgattagtgctccggttattgatgttttgaatagtttgttcgacgaatataaaataaacatagtcaaccctcattctgtatcaacatcaagttctcgggttggttttgagagacatgattatgaagatgatcatgacttcgtgaatgtgggggttgaaggattggcctctgtttatgacaagatggtgaatgaagagcttgactattgtgtacttgcaagaaagtgttgaaaacacaagggccaatacattggaaacagaatatgatgtgtttcatactagaagctcagtagtcttaagcttccggttttatttgtactagctagagatattctagctatgcaagtttcttctgtagcttctgattcttgttttagcaccagtggtcggatcttagagccacagaaaagttgcttaacacattatatgattgaggtcttgttgtgtactgaacaatagatgatttaaataattttt

SEQ ID NO: 32428 - protein, 287 aa, Arabidopsis thaliana
  misc_feature (1)..(287): Ceres Seq. ID no. 13593018
MEGKEEDVRVGANKFPERQPIGTSAQSTDKDYKEPPPAPLFEPGELSSWSFYRAGIAEFIATFLFLYITVLTVMGVKRAPNMCASVGIQGIAWAFGGMIFALVYCTAGISGGHINPAVTFGLFLARKLSLTRAVFYMIMQCLGAICGAGVVKGFQPTPYQTLGGGANTVAHGYTKGSGLGAEIIGTFVLVYTVFSATDAKRSARDSHVPILAPLPIGFAVFLVHLATIPITGTGINPARSLGAAIIYNKDHSWDDHWIFWVGPFIGAALAALYHQIVIRAIPFKSKS

SEQ ID NO: 32429 - protein, 214 aa, Arabidopsis thaliana
  misc_feature (1)..(214): Ceres Seq. ID no. 13593019
MGVKRAPNMCASVGIQGIAWAFGGMIFALVYCTAGISGGHINPAVTFGLFLARKLSLTRAVFYMIMQCLGAICGAGVVKGFQPTPYQTLGGGANTVAHGYTKGSGLGAEIIGTFVLVYTVFSATDAKRSARDSHVPILAPLPIGFAVFLVHLATIPITGTGINPARSLGAAIIYNKDHSWDDHWIFWVGPFIGAALAALYHQIVIRAIPFKSKS

SEQ ID NO: 32430 - protein, 206 aa, Arabidopsis thaliana
  misc_feature (1)..(206): Ceres Seq. ID no. 13593020
MCASVGIQGIAWAFGGMIFALVYCTAGISGGHINPAVTFGLFLARKLSLTRAVFYMIMQCLGAICGAGVVKGFQPTPYQTLGGGANTVAHGYTKGSGLGAEIIGTFVLVYTVFSATDAKRSARDSHVPILAPLPIGFAVFLVHLATIPITGTGINPARSLGAAIIYNKDHSWDDHWIFWVGPFIGAALAALYHQIVIRAIPFKSKS

SEQ ID NO: 32431 - DNA, 1468 bp, Arabidopsis thaliana
  misc_feature (1)..(1468): Ceres Seq. ID no. 13593033
aaacttttgtctctttttaactctcttaactttcgtttcttctcctaccttcttttaccaacctttcctttctcttacacacatatatatatacatatatagagagagagaagaggacaaagagttgaaagatgaagactctcatgtcttcatagaaacaagtgatatgtgcgctaagaaagaagaagaagaagaagaagaagaagacagttctgaagccatgaacaacatacaaaattaccaaaatgacctcttctttcaccaactcatctctcatcatcaccatcatcatcatgatccttctcaatctgaaactttgggagcatccggtaacgttggatctggtttcactatcttctctcaagattccgtctctccaatatggtctctacctccacctacctcgatccaaccaccatttgatcagtttcctcctccttcttcttctccagcatctttctacggaagtttcttcaacagaagtcgagctcatcatcagggattacagtttgggtacgagggttttggtggagccacgtcagcagcacatcatcatcatgaacaacttcggatcttgtcggaagctttaggtccggtagtacaagccgggtccggtccttttgggttacaagctgagttagggaagatgacagcacaagagatcatggacgctaaagctttggctgcttcaaagagtcatagtgaagctgagagaagaagaagagagagaatcaataatcatctcgctaagctccgtagcatattacccaacaccaccaaaacggataaagcgtcgttactagctgaagtgatccaacatgtgaaagagttgaagagagagacttcagtgatctcagagacaaatcttgtcccaacggaaagcgatgagttaacggtagctttcacggaggaggaagaaaccggagatggcagatttgtaattaaagcgtcgctttgctgtgaagacaggtcggatctcttgcctgacatgattaaaacattgaaagctatgcgtctcaaaacgctcaaggcggagataaccaccgttgggggacgagtcaagaacgttttgtttgttaccggagaagagagctccggtgaggaagtggaggaagagtactgtatagggacgattgaggaagctttgaaagcggtgatggagaagagcaatgtagaggaatcatcttcttctggaaatgctaagagacagagaatgagtagtcacaacactatcactatcgtcgaacaacaacaacaatataatcagaggtaatcaattttttacttaaatcgctttttttttcttactttcggtgtatctactacgtgtgttgtttgctggttatggaaatgaatgttgtacgtcacgttatactatagatatatgtgtgtttgtgtgtatgtataacggaagtatttgtatccgttgtggtcttggacttttggtttggttctaagatacttattt

SEQ ID NO: 32432 - protein, 423 aa, Arabidopsis thaliana
  misc_feature (1)..(423): Ceres Seq. ID no. 13593034
NFCLFLTLLTFVSSPTFFYQPFLSLTHIYIYIYREREEDKELKDEDSHVFIETSDMCAKKEEEEEEEEDSSEAMNNIQNYQNDLFFHQLISHHHHHHHDPSQSETLGASGNVGSGFTIFSQDSVSPIWSLPPPTSIQPPFDQFPPPSSSPASFYGSFFNRSRAHHQGLQFGYEGFGGATSAAHHHHEQLRILSEALGPVVQAGSGPFGLQAELGKMTAQEIMDAKALAASKSHSEAERRRRERINNHLAKLRSILPNTTKTDKASLLAEVIQHVKELKRETSVISETNLVPTESDELTVAFTEEEETGDGRFVIKASLCCEDRSDLLPDMIKTLKAMRLKTLKAEITTVGGRVKNVLFVTGEESSGEEVEEEYCIGTIEEALKAVMEKSNVEESSSSGNAKRQRMSSHNTITIVEQQQQYNQR

SEQ ID NO: 32433 - protein, 368 aa, Arabidopsis thaliana
  misc_feature (1)..(368): Ceres Seq. ID no. 13593035
MCAKKEEEEEEEEDSSEAMNNIQNYQNDLFFHQLISHHHHHHHDPSQSETLGASGNVGSGFTIFSQDSVSPIWSLPPPTSIQPPFDQFPPPSSSPASFYGSFFNRSRAHHQGLQFGYEGFGGATSAAHHHHEQLRILSEALGPVVQAGSGPFGLQAELGKMTAQEIMDAKALAASKSHSEAERRRRERINNHLAKLRSILPNTTKTDKASLLAEVIQHVKELKRETSVISETNLVPTESDELTVAFTEEEETGDGRFVIKASLCCEDRSDLLPDMIKTLKAMRLKTLKAEITTVGGRVKNVLFVTGEESSGEEVEEEYCIGTIEEALKAVMEKSNVEESSSSGNAKRQRMSSHNTITIVEQQQQYNQR

SEQ ID NO: 32434 - protein, 350 aa, Arabidopsis thaliana
  misc_feature (1)..(350): Ceres Seq. ID no. 13593036
MNNIQNYQNDLFFHQLISHHHHHHHDPSQSETLGASGNVGSGFTIFSQDSVSPIWSLPPPTSIQPPFDQFPPPSSSPASFYGSFFNRSRAHHQGLQFGYEGFGGATSAAHHHHEQLRILSEALGPVVQAGSGPFGLQAELGKMTAQEIMDAKALAASKSHSEAERRRRERINNHLAKLRSILPNTTKTDKASLLAEVIQHVKELKRETSVISETNLVPTESDELTVAFTEEEETGDGRFVIKASLCCEDRSDLLPDMIKTLKAMRLKTLKAEITTVGGRVKNVLFVTGEESSGEEVEEEYCIGTIEEALKAVMEKSNVEESSSSGNAKRQRMSSHNTITIVEQQQQYNQR

SEQ ID NO: 32435 - DNA, 1272 bp, Arabidopsis thaliana
  misc_feature (1)..(1272): Ceres Seq. ID no. 13593041
gaagaagcaaaaccctagagctcaaggtaatcgccgtcgatttctcaatctctcaccggcgattacatgccgatgaaagttgtacaatagctgctgtaagagagagatttatcaggtatttttagaatcatgtatagagacagaggaacggtgaattcgagacctgaagttgtggatcgtaaacggatcaacgacgctcttgaacgtccttctccttcaacctctcgtcaagttaacggcaaaggcaaaggaaccgttacggcggcgacgacgacggcgaacttgattgggaagcagcagtcgaataacatcaaccatagagattctcgttctgcttctctctcgaagaacaatacggtttctgatgatgaatcagacacagatagtgaagaatcagatgtgagtggttctgatggagaggacacttcatggatatcttggttttgtaatctaagaggaaacgagttcttttgtgaagttgatgatgattacattcaagatgacttcaacttgtgtggactcagcagtctagttccctactacgagtacgctcttgatttgattttggatgttgaatcttctcaaggagagatgtttacagaggaacagaatgaattgatcgagtcagcagctgagatgttgtatggactgattcatgctcgttacatattgactagcaaaggattggcagcaatgttagacaaatacaaaaactatgactttggaagatgtccaagagtttattgctgtggccaaccttgtcttccggttggtcaatcagacttaccgcgatctagcactgtgaagatatattgcccgaaatgcgaagacatttattacccacgatcaaagtatcaaggcaacattgatggagcttactttgggacaacgtttccacatctgttcctgatgacttatgggcatctcaagccagcgaaggcaacacaaaactatgttcaaagagtgtttgggttcaaattacacaaaccgtgaaggaagtttgacgacaaaacccaaggatcaagatcatggcgttggaatggaactgagaaaagaagagacgtgtgtgaacagaaacggaaaataaaacgcactgtaatcacacgaatggtgaagagagcattcatgtctctatttgtcttcaggtacatacacattagaagaaagcaaaagcatggttagaaagaaaaaaaacacgaaaatcttttaatgagtttgttaaacttgaacatgtatttttctaccttctgtaaacttttttattttgtttct

SEQ ID NO: 32436 - protein, 287 aa, Arabidopsis thaliana
  misc_feature (1)..(287): Ceres Seq. ID no. 13593042
MYRDRGTVNSRPEVVDRKRINDALERPSPSTSRQVNGKGKGTVTAATTTANLIGKQQSNNINHRDSRSASLSKNNTVSDDESDTDSEESDVSGSDGEDTSWISWFCNLRGNEFFCEVDDDYIQDDFNLCGLSSLVPYYEYALDLILDVESSQGEMFTEEQNELIESAAEMLYGLIHARYILTSKGLAAMLDKYKNYDFGRCPRVYCCGQPCLPVGQSDLPRSSTVKIYCPKCEDIYYPRSKYQGNIDGAYFGTTFPHLFLMTYGHLKPAKATQNYVQRVFGFKLHKP

SEQ ID NO: 32437 - DNA, 1627 bp, Arabidopsis thaliana
  misc_feature (1)..(1627): Ceres Seq. ID no. 13593066
aaagcttccatggctaatcttgtttaagcttctcttcttcttctctctcctgtgtctcgttcactagttttttttcgggggagagtgatggagtgtgtttgttgaatagttttgacgatcacatggctgagatttgttacgagaacgagactatgatgattgaaacgacggcgacggtggtgaagaaggcaacgacgacaacgaggagacgagaacggagctcgtctcaagcagcgagaagaaggagaatggagatccggaggtttaagtttgtttccggcgaacaagaacctgtcttcgtcgacggtgacttacagaggcggaggagaagagaatccaccgtcgcagcctccacctccaccgtgttttacgaaacggcgaaggaagttgtcgtcctatgcgagtctcttagttcaacggttgtggcattgcctgatcctgaagcttatcctaaatacggcgtcgcttcagtctgtggaagaagacgtgaaatggaagacgccgtcgctgtgcatccgtttttttcccgtcatcagacggaatattcatccaccggatttcactattgcggcgtttacgatggccatggctgttcccatgtagcgatgaaatgtagagaaagactacacgagctagtccgtgaagagtttgaagctgatgctgactgggaaaagtcaatggcgcgtagcttcacgcgcatggacatggaggttgttgcgttgaacgccgatggtgcggcaaaatgccggtgcgagcttcagaggccggactgcgacgcggtgggatccactgcggttgtgtctgtccttacgccggagaaaatcatcgtggcgaattgcggtgactcacgtgccgttctctgtcgtaacggcaaagccattgctttatcctccgatcataagccagaccgtccggacgagctagaccggattcaagcagcgggtggtcgtgttatctactgggatggcccacgtgtccttggagtacttgcaatgtcacgagccattggagataattacttgaagccgtatgtaatcagcagaccggaggtaaccgtgacggaccgggccaacggagacgattttcttattctcgcaagtgacggtctttgggacgttgtttcaaacgaaactgcatgtagcgtcgttcgaatgtgtttgagaggaaaagtcaatggtcaagtatcatcatcaccggaaagggaaatgacaggtgtcggcgccgggaatgtggtggttggaggaggagatttgccagataaagcgtgtgaggaggcgtcgctgttgctgacgaggcttgcgttggctagacaaagttcggacaacgtaagtgttgtggtggttgatctacgacgagacacgtagttgtatttgtctctctcgtaatgtttgttgttttttgtcctgagtcatcgacttttgggctttttcttttaaccttttttgctcttcggtgtaagacaacgaagggtttttaatttagcttgactatgggttatgtcagtcactgtgttgaatcgcggtttagatctacaaagattttcaccagtagtgaaaatggtaaaaagccgtgaaatgtgaaagacttgagttcaatttaattttaaatttaatagaatcagttgatc

SEQ ID NO: 32438 - protein, 413 aa, Arabidopsis thaliana
  misc_feature (1)..(413): Ceres Seq. ID no. 13593067
MAEICYENETMMIETTATVVKKATTTTRRRERSSSQAARRRRMEIRRFKFVSGEQEPVFVDGDLQRRRRRESTVAASTSTVFYETAKEVVVLCESLSSTVVALPDPEAYPKYGVASVCGRRREMEDAVAVHPFFSRHQTEYSSTGFHYCGVYDGHGCSHVAMKCRERLHELVREEFEADADWEKSMARSFTRMDMEVVALNADGAAKCRCELQRPDCDAVGSTAVVSVLTPEKIIVANCGDSRAVLCRNGKAIALSSDHKPDRPDELDRIQAAGGRVIYWDGPRVLGVLAMSRAIGDNYLKPYVISRPEVTVTDRANGDDFLILASDGLWDVVSNETACSVVRMCLRGKVNGQVSSSPEREMTGVGAGNVVVGGGDLPDKACEEASLLLTRLALARQSSDNVSVVVVDLRRDT

SEQ ID NO: 32439 - protein, 403 aa, Arabidopsis thaliana
  misc_feature (1)..(403): Ceres Seq. ID no. 13593068
MMIETTATVVKKATTTTRRRERSSSQAARRRRMEIRRFKFVSGEQEPVFVDGDLQRRRRRESTVAASTSTVFYETAKEVVVLCESLSSTVVALPDPEAYPKYGVASVCGRRREMEDAVAVHPFFSRHQTEYSSTGFHYCGVYDGHGCSHVAMKCRERLHELVREEFEADADWEKSMARSFTRMDMEVVALNADGAAKCRCELQRPDCDAVGSTAVVSVLTPEKIIVANCGDSRAVLCRNGKAIALSSDHKPDRPDELDRIQAAGGRVIYWDGPRVLGVLAMSRAIGDNYLKPYVISRPEVTVTDRANGDDFLILASDGLWDVVSNETACSVVRMCLRGKVNGQVSSSPEREMTGVGAGNVVVGGGDLPDKACEEASLLLTRLALARQSSDNVSVVVVDLRRDT

SEQ ID NO: 32440 - protein, 402 aa, Arabidopsis thaliana
  misc_feature (1)..(402): Ceres Seq. ID no. 13593069
MIETTATVVKKATTTTRRRERSSSQAARRRRMEIRRFKFVSGEQEPVFVDGDLQRRRRRESTVAASTSTVFYETAKEVVVLCESLSSTVVALPDPEAYPKYGVASVCGRRREMEDAVAVHPFFSRHQTEYSSTGFHYCGVYDGHGCSHVAMKCRERLHELVREEFEADADWEKSMARSFTRMDMEVVALNADGAAKCRCELQRPDCDAVGSTAVVSVLTPEKIIVANCGDSRAVLCRNGKAIALSSDHKPDRPDELDRIQAAGGRVIYWDGPRVLGVLAMSRAIGDNYLKPYVISRPEVTVTDRANGDDFLILASDGLWDVVSNETACSVVRMCLRGKVNGQVSSSPEREMTGVGAGNVVVGGGDLPDKACEEASLLLTRLALARQSSDNVSVVVVDLRRDT

SEQ ID NO: 32441 - DNA, 1702 bp, Arabidopsis thaliana
  misc_feature (1)..(1702): Ceres Seq. ID no. 13593094
ctttcccccctgcaggaattcggcaccagagagagagagagagagctcactagtcccccccccccgagggtaaaagctttctcttttattgtgtcttgtcttgcattttcctctgttacgttttgcgttgtttacgaaaaatgtaggaaataaatttggttgcttgctttgttggtgtgtgaaccgacacttatctctgtgatttttttaattaaattctcagtgatgtttgaaggaattgtttcaatcttcgttaccttaaaatgatgtcgtcattgttattgtattgggtaaattttctgttttgtaattgttttagcatatgtctctgtctgattgtgtcagagttttgagtgaaacccccaaagttttattttttttatttaactggacatgaagctgtttttgaattcagcttttggtgaattttacgctgatttttgaatgtgttttatcttttcttgggtacagttagatagatagcatgaattggttacctgaagctgaagctgaggatgacttcaaaggtcttctctctggtgatttctttgatgatctcatcaatcaccttgacgtccctcttgatgacattgataccaccaatggtgaaggagattgggttgacaggtttcaagaccttgagcctcctcccatggatatgttccccactttgccttctgacctcacctcttgcggctctggcatggccaaggcccctcgtgtggatattcaaaggaacattcctgctttgaaacagtcctattcttctgaagccttgtccagcactctccaccaatcttcagctcctcctgaaatcaaagtttcgaaactatttcagtctttaagtccagtgtcagttctcgagaacagttatggttctctctcgacccacaacaatggatctcagagattggctttccctgtgaaaggcatgagaagcaagcgcaaacgccccacaacactgagacttagctacctttaccctctgaaccccgaaagcccgagaagtcaaccccgggcaaacctgaatccgagtgttacttttcttctgagcaacatgccaagaagaaacgcaagatccacctgaccacccgcacggtctcttccactctggaggcaagcaactcggatgggatagtccgcaaatgcactcattgcgagacaaccaagaccccacagtggagggaaggacccagtggaccgaagaccctctgcaatgcttgcggagtgaggttcagatctggtcgcctagttccagaataccgaccagcctcaagccccaccttcatcccagctgtgcattcaaactcacacaggaagatcattgagatgagaaggaaggacgacgaacagtttgatagcagcatgattcgggcagtgatatccagagggtaaagcagttttttttttaaagtttggtctctgatccgcagaaatgggaagtcagtggaggaagaagatggtataaaagtagggtttagtgactgttttcaaatctgatgaagagagtttagtggtttagttcaagttagggatatgaaatattttgttgtttcattatgtgtttttatctttatctcttggctgacatttgtgtatcagaggaaaacaggtgaagccaaagtttgctctctttttttcgctranaaaaaaaaaaaaaaaaaaaaaaaaaaaaaaaaaacctcgagggggggcccggtac

SEQ ID NO: 32442 - protein, 200 aa, Arabidopsis thaliana
  misc_feature (1)..(200): Ceres Seq. ID no. 15221196
MNWLPEAEAEDDFKGLLSGDFFDDLINHLDVPLDDIDTTNGEGDWVDRFQDLEPPPMDMFPTLPSDLTSCGSGMAKAPRVDIQRNIPALKQSYSSEALSSTLHQSSAPPEIKVSKLFQSLSPVSVLENSYGSLSTHNNGSQRLAFPVKGMRSKRKRPTTLRLSYLYPLNPESPRSQPRANLNPSVTFLLSNMPRRNARST

SEQ ID NO: 32443 - protein, 144 aa, Arabidopsis thaliana
  misc_feature (1)..(144): Ceres Seq. ID no. 15221197
MDMFPTLPSDLTSCGSGMAKAPRVDIQRNIPALKQSYSSEALSSTLHQSSAPPEIKVSKLFQSLSPVSVLENSYGSLSTHNNGSQRLAFPVKGMRSKRKRPTTLRLSYLYPLNPESPRSQPRANLNPSVTFLLSNMPRRNARST

SEQ ID NO: 32444 - protein, 142 aa, Arabidopsis thaliana
  misc_feature (1)..(142): Ceres Seq. ID no. 15221198
MFPTLPSDLTSCGSGMAKAPRVDIQRNIPALKQSYSSEALSSTLHQSSAPPEIKVSKLFQSLSPVSVLENSYGSLSTHNNGSQRLAFPVKGMRSKRKRPTTLRLSYLYPLNPESPRSQPRANLNPSVTFLLSNMPRRNARST

SEQ ID NO: 32445 - DNA, 1489 bp, Arabidopsis thaliana
  misc_feature (1)..(1489): Ceres Seq. ID no. 13593099
ccccccccccscgaaaatgaatgttktgtttgtttttgtacggtggagagaagaacgaaaagatgatcaggtaaaaaatgaaacttggaaatcatgcaaagccacacctctcccttcaacacattcttacgtgtcctcttctcttcactccatatctcctttttattaccaaaaatatatatttcaatcccatttatatgtacgttctcttagacttatctctatatacccccttttaatttgtgtgctcttagcctttactctatagttttatatcatatcaatcgacatggcgaatgtggaccgtgatcggcgtgtgcatgtagaccgtactgacaaacgtgttcatcagccaaactacgaagatgatgtcggttttggtggctatggcggttatggtgctggttctgattataagagtcgcggcccctccactaaccaagtatttttgtggtctctttagtttttcttgtgttttcctatgatcacgctctccaaactatttgaagattttctgtaaattcattttaaacagaaagataaataaaatagtgaagaaccataggaatcgtacgttacgttaattatttccttttagttcttaagtcctaattaggattcctttaaaagatgcaacaatctaattgttcacaaaatgagtaaagtttgaaacagatttttatacaccacttgcatatgtttaacatggtgatgcatgcatggatcatatctagagatttatggttggatatatatttaacattttgatattagtttttaaaaaggtctgaataaacaacacttgttagataaactcgatataatcaatacatgcagatcttggcacttatagcaggagttcccattggtggcacactgctaaccctagctggactcactctagccggttcggtgatcggcttgctagtctccatacccctcttcctcctcttcagtccggtgatagtcccggcggctctcactattgggcttgctgtgacgggaatcttggcttctggtttgtttgggttgacgggtctgagctcggtctcgtgggtcctcaactacctccgtgggacgagtgatacagtgccagagcaattggactacgctaaacggcgtatggctgatgcggtaagctatgctggtatgaagggaaaagagatgggtcagtatgtgcaagataaggcgcatgaggctcgtgagactgagttcatgactgagacccatgagccgggtaaggccaggagaggctcataagctaatataaattgcgggagtcagttggaaaggcgataaatgtagttttacttttatgttccagtttctttcctcttttaagaatatctttgtctatatgtgtacgttcgttttgtcttgtccaaataaaaatccttgttagtgaaataagaaatgaaataaatatgttttcctttttgaaaaaaaaaaaaaaaaaaaaaaarctcgagggggggcccggtactcaatt

SEQ ID NO: 32446 - protein, 142 aa, Arabidopsis thaliana
  misc_feature (1)..(142): Ceres Seq. ID no. 15221199
MQILALIAGVPIGGTLLTLAGLTLAGSVIGLLVSIPLFLLFSPVIVPAALTIGLAVTGILASGLFGLTGLSSVSWVLNYLRGTSDTVPEQLDYAKRRMADAVSYAGMKGKEMGQYVQDKAHEARETEFMTETHEPGKARRGS

SEQ ID NO: 32447 - protein, 88 aa, Arabidopsis thaliana
  misc_feature (1)..(88): Ceres Seq. ID no. 15221200
  misc_feature (4)..(4): Xaa is any aa, unknown or other
  misc_feature (9)..(9): Xaa is any aa, unknown or other
PPPXKMNVXFVFVRWREERKDDQVKNETWKSCKATPLPSTHSYVSSSLHSISPFYYQKYIFQSHLYVRSLRLISIYPLLICVLLAFTL

SEQ ID NO: 32448 - protein, 83 aa, Arabidopsis thaliana
  misc_feature (1)..(83): Ceres Seq. ID no. 15221201
  misc_feature (4)..(4): Xaa is any aa, unknown or other
MNVXFVFVRWREERKDDQVKNETWKSCKATPLPSTHSYVSSSLHSISPFYYQKYIFQSHLYVRSLRLISIYPLLICVLLAFTL

SEQ ID NO: 32449 - DNA, 972 bp, Arabidopsis thaliana
  misc_feature (1)..(972): Ceres Seq. ID no. 13593100
atgggagacgaccagctagatttcgagctcccagaagaggttttgtcggtgattccgatggacccttttgagcagctggatctcgcgaggaagattacatcaatggcgatagcttcaagggtgtcgaatctggactctgaggtggttgaattgagacagaagcttctgggtaaggaaagtgttgtccgtgagcttgaggagaaagcgtctcgcctggagagagactgccgcgaggctgattcgagattgaaggtcgttctcgaagataatatgaacctgacaaaggagaaggattcactggcaatgactgtaacgaaactcacccgtgatttggctaagacattcaagcggcagttaatcaaatccctgagcgatgagagtggtccgcaaacagaacctgttgatattaggacatgcgaccagccaggatcatatccaggcaaagatggaaggatcaatgcacactcaattaaacaagcttacagtggatctacagacacgaacaatccagttgttgaagcttcaaaatacactggaaacaaattttcaatgacatcatacatatctccacgtcttaccccaaccgcaacaccaaagatcatctccacaagtgtgtctcctcgaggctattctgcagcaggttctcctaaaagaacatcaggtgcagtttctcccacaaaggcaacactctggtacccgtcaagtcagcaatcatcggctgcgaattctcctcctcgcaaccgcacactcccagctcgtacaccgcggatggatggtaaagaattcttccggcaagccaggagccgattatcctatgaacaattcagttccttcttagctaacatcaaagagctcaacgcccagaagcaaacccgagaggaaactctgaggaaagcagatgagatatttggggaagagaacaaagatctttatttatctttccaaggtctccttaacagaaacatgcgttaa

SEQ ID NO: 32450 - protein, 323 aa, Arabidopsis thaliana
  misc_feature (1)..(323): Ceres Seq. ID no. 13593101
MGDDQLDFELPEEVLSVIPMDPFEQLDLARKITSMAIASRVSNLDSEVVELRQKLLGKESVVRELEEKASRLERDCREADSRLKVVLEDNMNLTKEKDSLAMTVTKLTRDLAKTFKRQLIKSLSDESGPQTEPVDIRTCDQPGSYPGKDGRINAHSIKQAYSGSTDTNNPVVEASKYTGNKFSMTSYISPRLTPTATPKIISTSVSPRGYSAAGSPKRTSGAVSPTKATLWYPSSQQSSAANSPPRNRTLPARTPRMDGKEFFRQARSRLSYEQFSSFLANIKELNAQKQTREETLRKADEIFGEENKDLYLSFQGLLNRNMR

SEQ ID NO: 32451 - protein, 304 aa, Arabidopsis thaliana
  misc_feature (1)..(304): Ceres Seq. ID no. 13593102
MDPFEQLDLARKITSMAIASRVSNLDSEVVELRQKLLGKESVVRELEEKASRLERDCREADSRLKVVLEDNMNLTKEKDSLAMTVTKLTRDLAKTFKRQLIKSLSDESGPQTEPVDIRTCDQPGSYPGKDGRINAHSIKQAYSGSTDTNNPVVEASKYTGNKFSMTSYISPRLTPTATPKIISTSVSPRGYSAAGSPKRTSGAVSPTKATLWYPSSQQSSAANSPPRNRTLPARTPRMDGKEFFRQARSRLSYEQFSSFLANIKELNAQKQTREETLRKADEIFGEENKDLYLSFQGLLNRNMR

SEQ ID NO: 32452 - protein, 289 aa, Arabidopsis thaliana
  misc_feature (1)..(289): Ceres Seq. ID no. 13593103
MAIASRVSNLDSEVVELRQKLLGKESVVRELEEKASRLERDCREADSRLKVVLEDNMNLTKEKDSLAMTVTKLTRDLAKTFKRQLIKSLSDESGPQTEPVDIRTCDQPGSYPGKDGRINAHSIKQAYSGSTDTNNPVVEASKYTGNKFSMTSYISPRLTPTATPKIISTSVSPRGYSAAGSPKRTSGAVSPTKATLWYPSSQQSSAANSPPRNRTLPARTPRMDGKEFFRQARSRLSYEQFSSFLANIKELNAQKQTREETLRKADEIFGEENKDLYLSFQGLLNRNMR

SEQ ID NO: 32453 - DNA, 2438 bp, Arabidopsis thaliana
  misc_feature (1)..(2438): Ceres Seq. ID no. 13593104
gatctagaatcttccctcaacctctagaaaacaactttcgtatccttcaaaaaccctaaaccctagcttttgcacagacgcaatttcatcgcatcattttgcaattttcctttactgatctgtcaccacctcttgaatttcgaaaccatggctaccgcagctctcctccgctctattcgacgccgtgaagtcgtttcctctcctttctcagcttacagatgcctttcaagcagtgggaaagcatcattgaacagttcctatctgggtcagaattttagaagcttttccagagcctttagctcgaagcctgctggaaacgatgtcattggtattgatttgggtactactaattcatgtgttgccgtcatggaggggaagaatccgaaagtcattgaaaatgctgaaggtgctcgaaccactccatcagttgtagcattcaacacgaaaggagaacttcttgtgggtacaccagccaagcgacaagctgtcactaatcctacaaacacagtatctggaacgaaacgtttgattgggagaaagttcgacgatccacaaactcagaaagaaatgaagatggtgccttacaagattgtgcgtgcacctaatggcgatgcgtgggttgaagccaatggtcagcagtattctcctagtcagattggagcgtttatcttgacgaagatgaaagagacggccgaagcttaccttggaaaatctgtcacgaaagctgttgtcactgttccagcttactttaatgatgctcagagacaagcaacaaaagatgctggtagaattgctggtcttgatgttgagagaatcataaatgaaccgacggctgctgctctgtcctatggaatgaccaacaaggaggggttgattgctgtgtttgatcttggtggtgggacatttgatgtatctgttttggagatttctaatggggtattcgaggtgaaagccaccaatggtgataccttcttgggaggtgaggatttcgacaatgctctgctagacttcttggttaatgagttcaagaccactgagggaatagacctagccaaagacagacttgctctgcagaggcttagagaagccgctgagaaagcgaagattgaactgtcatctacttctcaaactgaaattaatctcccatttatcacagccgatgcatctggagcaaagcatttcaacatcaccctaacaaggtcaaggtttgaaactcttgtgaatcacttgattgagaggacccgcgatccttgcaagaactgtctcaaggatgctggtataagtgctaaggaagttgatgaggttcttctagttggaggaatgacgcgtgtccccaaggttcagtctattgttgcggagatctttggaaagagtccaagcaaaggtgtcaatcctgatgaggctgttgctatgggagctgcacttcaaggtggtatcctccgcggtgatgtcaaagaattgttgcttctggatgtcacacctctatcgctcggtattgaaacacttggtggtgtctttacgagactgatcacccgaaatacaaccatccccacaaagaagagtcaggtgttctcaactgcagccgataatcagactcaagttgggatcagggtgcttcaaggtgagcgtgaaatggcaacagacaacaagctcttgggagaatttgatctagttggcattccaccatctccaagaggagtccctcagatcgaagtgacatttgacattgatgccaatggcattgtcactgtttccgccaaggacaagacgactggtaaagtacaacagatcacaatccgatcctctggtgggctctcagaggatgatatccagaagatggtgagagaagcagagttgcatgctcagaaagacaaagaaagaaaagaattgatcgacaccaagaacacagctgacacaacaatttacagcatagagaagagtcttggtgaatacagagagaagatcccaagtgaaatcgccaaggagattgaagatgctgtggcagatctaaggagcgcttcctctggggatgatctcaacgagatcaaggccaagattgaggcggcaaacaaagctgtttctaagattggggagcacatgtctggtggttctggtggaggctctgcaccaggaggaggatctgagggaggcagtgatcaagctccagaagcagagtacgaggaagtgaaaaagtgaggagatttggtaaattcttgccacttgggttttaagagattaggtttagatcatggtgggttctatgtccaaggaacttttgccttttagaacaacgagcagtggatatgtttctggaataagcttttgtcagggaactaaacttaatgtttctctgctaaaaaacctttgttatgtaatgtgatggttaaagagaagaagttttcaaaattttgtcactttatactttatagtttattttc

SEQ ID NO: 32454 - protein, 682 aa, Arabidopsis thaliana
  misc_feature (1)..(682): Ceres Seq. ID no. 13593105
MATAALLRSIRRREVVSSPFSAYRCLSSSGKASLNSSYLGQNFRSFSRAFSSKPAGNDVIGIDLGTTNSCVAVMEGKNPKVIENAEGARTTPSVVAFNTKGELLVGTPAKRQAVTNPTNTVSGTKRLIGRKFDDPQTQKEMKMVPYKIVRAPNGDAWVEANGQQYSPSQIGAFILTKMKETAEAYLGKSVTKAVVTVPAYFNDAQRQATKDAGRIAGLDVERIINEPTAAALSYGMTNKEGLIAVFDLGGGTFDVSVLEISNGVFEVKATNGDTFLGGEDFDNALLDFLVNEFKTTEGIDLAKDRLALQRLREAAEKAKIELSSTSQTEINLPFITADASGAKHFNITLTRSRFETLVNHLIERTRDPCKNCLKDAGISAKEVDEVLLVGGMTRVPKVQSIVAEIFGKSPSKGVNPDEAVAMGAALQGGILRGDVKELLLLDVTPLSLGIETLGGVFTRLITRNTTIPTKKSQVFSTAADNQTQVGIRVLQGEREMATDNKLLGEFDLVGIPPSPRGVPQIEVTFDIDANGIVTVSAKDKTTGKVQQITIRSSGGLSEDDIQKMVREAELHAQKDKERKELIDTKNTADTTIYSIEKSLGEYREKIPSEIAKEIEDAVADLRSASSGDDLNEIKAKIEAANKAVSKIGEHMSGGSGGGSAPGGGSEGGSDQAPEAEYEEVKK

SEQ ID NO: 32455 - protein, 609 aa, Arabidopsis thaliana
  misc_feature (1)..(609): Ceres Seq. ID no. 13593106
MEGKNPKVIENAEGARTTPSVVAFNTKGELLVGTPAKRQAVTNPTNTVSGTKRLIGRKFDDPQTQKEMKMVPYKIVRAPNGDAWVEANGQQYSPSQIGAFILTKMKETAEAYLGKSVTKAVVTVPAYFNDAQRQATKDAGRIAGLDVERIINEPTAAALSYGMTNKEGLIAVFDLGGGTFDVSVLEISNGVFEVKATNGDTFLGGEDFDNALLDFLVNEFKTTEGIDLAKDRLALQRLREAAEKAKIELSSTSQTEINLPFITADASGAKHFNITLTRSRFETLVNHLIERTRDPCKNCLKDAGISAKEVDEVLLVGGMTRVPKVQSIVAEIFGKSPSKGVNPDEAVAMGAALQGGILRGDVKELLLLDVTPLSLGIETLGGVFTRLITRNTTIPTKKSQVFSTAADNQTQVGIRVLQGEREMATDNKLLGEFDLVGIPPSPRGVPQIEVTFDIDANGIVTVSAKDKTTGKVQQITIRSSGGLSEDDIQKMVREAELHAQKDKERKELIDTKNTADTTIYSIEKSLGEYREKIPSEIAKEIEDAVADLRSASSGDDLNEIKAKIEAANKAVSKIGEHMSGGSGGGSAPGGGSEGGSDQAPEAEYEEVKK

SEQ ID NO: 32456 - protein, 542 aa, Arabidopsis thaliana
  misc_feature (1)..(542): Ceres Seq. ID no. 13593107
MKMVPYKIVRAPNGDAWVEANGQQYSPSQIGAFILTKMKETAEAYLGKSVTKAVVTVPAYFNDAQRQATKDAGRIAGLDVERIINEPTAAALSYGMTNKEGLIAVFDLGGGTFDVSVLEISNGVFEVKATNGDTFLGGEDFDNALLDFLVNEFKTTEGIDLAKDRLALQRLREAAEKAKIELSSTSQTEINLPFITADASGAKHFNITLTRSRFETLVNHLIERTRDPCKNCLKDAGISAKEVDEVLLVGGMTRVPKVQSIVAEIFGKSPSKGVNPDEAVAMGAALQGGILRGDVKELLLLDVTPLSLGIETLGGVFTRLITRNTTIPTKKSQVFSTAADNQTQVGIRVLQGEREMATDNKLLGEFDLVGIPPSPRGVPQIEVTFDIDANGIVTVSAKDKTTGKVQQITIRSSGGLSEDDIQKMVREAELHAQKDKERKELIDTKNTADTTIYSIEKSLGEYREKIPSEIAKEIEDAVADLRSASSGDDLNEIKAKIEAANKAVSKIGEHMSGGSGGGSAPGGGSEGGSDQAPEAEYEEVKK

SEQ ID NO: 32457 - DNA, 729 bp, Arabidopsis thaliana
  misc_feature (1)..(729): Ceres Seq. ID no. 13593108
atggccaccgatggcgagagtatctcgatgtcgttggcggtggctacctgcgtcgcgatggcactattctacgttttgatcctttacgttcccaccgtgatactccgtctcccgtcggcttcttcttacaccgaattcatgattcggcgattcatctgcgcggccatttgtactgtagcatctctcgtcttcacagcttttatacttccgataaaaagctgggaggcctcttatatacttggagtttatggcataaggaaagatcatctggcaccagtaactgaggagctggttttccgatcatgtatgatacctttgcttctgtgtgctgggtttaggattaacactgccatctttctgtgcccagttctctttagcttggctcacttaaaccattttagagagatgtacatcaggcataaccgcagctatctccgggcttcacttattgttggtcttcagcttggctacacagtcatttttggtgcatatgcatcgtttctcttcatcagaaccggacatcttgctgctcctttgtttgctcatatattttgcaactacatgggattgcctgtgctatacgcaaatggaaaaggtttggtgagtgcagcgttcttaggcggtgtggttgggttcgtcttacttctctttcctttaacaaagcctctcatgtacaacgatagtaccaacgattgtccgtgttggcttggctattgtttgtggaattga

SEQ ID NO: 32458 - protein, 242 aa, Arabidopsis thaliana
  misc_feature (1)..(242): Ceres Seq. ID no. 13593109
MATDGESISMSLAVATCVAMALFYVLILYVPTVILRLPSASSYTEFMIRRFICAAICTVASLVFTAFILPIKSWEASYILGVYGIRKDHLAPVTEELVFRSCMIPLLLCAGFRINTAIFLCPVLFSLAHLNHFREMYIRHNRSYLRASLIVGLQLGYTVIFGAYASFLFIRTGHLAAPLFAHIFCNYMGLPVLYANGKGLVSAAFLGGVVGFVLLLFPLTKPLMYNDSTNDCPCWLGYCLWN

SEQ ID NO: 32459 - protein, 233 aa, Arabidopsis thaliana
  misc_feature (1)..(233): Ceres Seq. ID no. 13593110
MSLAVATCVAMALFYVLILYVPTVILRLPSASSYTEFMIRRFICAAICTVASLVFTAFILPIKSWEASYILGVYGIRKDHLAPVTEELVFRSCMIPLLLCAGFRINTAIFLCPVLFSLAHLNHFREMYIRHNRSYLRASLIVGLQLGYTVIFGAYASFLFIRTGHLAAPLFAHIFCNYMGLPVLYANGKGLVSAAFLGGVVGFVLLLFPLTKPLMYNDSTNDCPCWLGYCLWN

SEQ ID NO: 32460 - protein, 223 aa, Arabidopsis thaliana
  misc_feature (1)..(223): Ceres Seq. ID no. 13593111
MALFYVLILYVPTVILRLPSASSYTEFMIRRFICAAICTVASLVFTAFILPIKSWEASYILGVYGIRKDHLAPVTEELVFRSCMIPLLLCAGFRINTAIFLCPVLFSLAHLNHFREMYIRHNRSYLRASLIVGLQLGYTVIFGAYASFLFIRTGHLAAPLFAHIFCNYMGLPVLYANGKGLVSAAFLGGVVGFVLLLFPLTKPLMYNDSTNDCPCWLGYCLWN

SEQ ID NO: 32461 - DNA, 1450 bp, Arabidopsis thaliana
  misc_feature (1)..(1450): Ceres Seq. ID no. 13593112
gcagccaagaaatgcgggacgatggtgatgctcggtgtgctccagcttccctgccgcctccatcactctctcttttactcctcttcccaaattgcttcttctcgccctcaaggtgttgctaaagtggttctgaaaaaaggcaagacacagctcttcaaagacggaagtccaatggtgtacagtggagctgtcgacaggatcatcggaaaaccacctcctcagacaggagatgttgtcattgtagctgatggcactgagaatcccattggttggggtttgtataactctgtttctatgttctgtgttcgccttatgcagcttcaacacgaatccaccagagatccttcttgtgcattgaacattgagaagcttctccaaacaagaatcgctgaagcagttcagttgcgaaagagtttggcacttccctcggctaatactaatgcttatcgtcttgtcaacagtgaaggagatagattgtctggattgattgtggatgtgtttggagatatagctgtggtagcatcctctgctgcttggcttgaaaagtacaggattgaagtggagagttgcttaagatcaattgacggaattaatcatataaactggagaccttctcttgatgttcttaaagaagatggttttgacatctcaagtctgaaacagacacaatcatctactctcccacagagatcaatggtacggtgtgtggtgcccttaatcaggttgtggaaaatgggatctcatacgcaatttcgctagagggacagaagacagggttctacacggatcagcgcgaaaaccgtcacttcatatcaaccatctctgctggtaaaagagttcttgatctttgctgctatagtggtggatttgcactgaatgcagcgagaggaggtgctaccagtgttatcggaattgattcatctttacctgctttggagctcgccagagagaatgtaatcctcaacaatatggatccagagaaggttgttttctttaaacaagattcaacagaattcatgaagggtgcactgtcaagagaagagacatgggacatcgtgatcctagaccctcctaagctagctccgcggaaaaaggttttgcacaacgcttcaggaatgtacagaaatctcaactcgttggcaatgcgattgacaaggagtggcggtcttatgatgacatgctcatgttcaggggcaatgacacagagcgggaagttcttggggatacttcagagtgctgcagcaatgtcaggaaggaagatcacagtggtgcgggaggcaggagctgcgtctgaccacccactcgacccatcttaccctcaaggccaatatctctccaaccttctgcttcgggtgctgtgagcgcacggaagtttggtttgttagttcaacttttttttgtccgtagtttgtaaccatacatagaagacttataaaaggcagatttgggg

SEQ ID NO: 32462 - protein, 252 aa, Arabidopsis thaliana
  misc_feature (1)..(252): Ceres Seq. ID no. 13593113
AAKKCGTMVMLGVLQLPCRLHHSLFYSSSQIASSRPQGVAKVVLKKGKTQLFKDGSPMVYSGAVDRIIGKPPPQTGDVVIVADGTENPIGWGLYNSVSMFCVRLMQLQHESTRDPSCALNIEKLLQTRIAEAVQLRKSLALPSANTNAYRLVNSEGDRLSGLIVDVFGDIAVVASSAAWLEKYRIEVESCLRSIDGINHINWRPSLDVLKEDGFDISSLKQTQSSTLPQRSMVRCVVPLIRLWKMGSHTQFR

SEQ ID NO: 32463 - protein, 245 aa, Arabidopsis thaliana
  misc_feature (1)..(245): Ceres Seq. ID no. 13593114
MVMLGVLQLPCRLHHSLFYSSSQIASSRPQGVAKVVLKKGKTQLFKDGSPMVYSGAVDRIIGKPPPQTGDVVIVADGTENPIGWGLYNSVSMFCVRLMQLQHESTRDPSCALNIEKLLQTRIAEAVQLRKSLALPSANTNAYRLVNSEGDRLSGLIVDVFGDIAVVASSAAWLEKYRIEVESCLRSIDGINHINWRPSLDVLKEDGFDISSLKQTQSSTLPQRSMVRCVVPLIRLWKMGSHTQFR

SEQ ID NO: 32464 - protein, 243 aa, Arabidopsis thaliana
  misc_feature (1)..(243): Ceres Seq. ID no. 13593115
MLGVLQLPCRLHHSLFYSSSQIASSRPQGVAKVVLKKGKTQLFKDGSPMVYSGAVDRIIGKPPPQTGDVVIVADGTENPIGWGLYNSVSMFCVRLMQLQHESTRDPSCALNIEKLLQTRIAEAVQLRKSLALPSANTNAYRLVNSEGDRLSGLIVDVFGDIAVVASSAAWLEKYRIEVESCLRSIDGINHINWRPSLDVLKEDGFDISSLKQTQSSTLPQRSMVRCVVPLIRLWKMGSHTQFR

SEQ ID NO: 32465 - DNA, 1199 bp, Arabidopsis thaliana
  misc_feature (1)..(1199): Ceres Seq. ID no. 13593116
ttcctcttcttttctcttctccttccacttccacttcttctatctctcacaattcagcaatggcttcttctatagttacctctagcttgaagcctttagccatggccgattcttcctcttctaccattttctcccatccttccatctcctctaccatctcttcctccagaattcgcagctccagtgtttccctccttaccggacgcattaacctgcccctctctttctctcgcgtctctctatctcttaaaaccaaaacccaccttaaaaaatccccctttgtctccttcgttgcccagacttcggattgggctgaagaaggtggagaaggaagcgtcgctgttgaggagaccgagaacagtttagagtcacaagatgtgagcgaaggagatgagagcgaaggagatgcgagcgaaggagatgtgagcgaaggagatgagagcgaaggagatgtgagcgaaggagctgtgagcgaaagagctgagttcccggagccatcggaagaagccaagcttttcgtcggaaatttggcttatgatgttaatagccaagctttggctatgctctttgagcaagccggtactgttgaaatcgccgaggttatatacaatagggaaactgaccagagtcgtgggtttggatttgtgacaatgagttctgtggacgaagctgagacagctgtggagaagttcaaccgttatgatcttaacggacgtctactaactgtaaacaaggcagctccaagaggatcacgtccagaacgtgcgcctcgggtatatgaacctgcattcagagtatatgtagggaatctaccatgggatgtggacaatggccgtctagaacagcttttcagtgagcatggtaaagttgtggaagctagggtggtttacgaccgtgagacaggtcgttcacgtggattcgggtttgtcacaatgtctgacgtggatgaactcaacgaagccatctctgccctcgatggacagaacttggagggtagagcaatcagagtgaatgtagcggaagagcgtcctccaaggcgtggatattaaagctgagatctagctgtgccctctctctctccctatcttgcattttgtttagacgagattcttacactcttcaacgattgtttttggctgaactctgaatgtgaaagttaagctgcttctaaagtaatttgtatcgcttgtttttgatga

SEQ ID NO: 32466 - protein, 348 aa, Arabidopsis thaliana
  misc_feature (1)..(348): Ceres Seq. ID no. 13593117
PLLFSSPSTSTSSISHNSAMASSIVTSSLKPLAMADSSSSTIFSHPSISSTISSSRIRSSSVSLLTGRINLPLSFSRVSLSLKTKTHLKKSPFVSFVAQTSDWAEEGGEGSVAVEETENSLESQDVSEGDESEGDASEGDVSEGDESEGDVSEGAVSERAEFPEPSEEAKLFVGNLAYDVNSQALAMLFEQAGTVEIAEVIYNRETDQSRGFGFVTMSSVDEAETAVEKFNRYDLNGRLLTVNKAAPRGSRPERAPRVYEPAFRVYVGNLPWDVDNGRLEQLFSEHGKVVEARVVYDRETGRSRGFGFVTMSDVDELNEAISALDGQNLEGRAIRVNVAEERPPRRGY

SEQ ID NO: 32467 - protein, 329 aa, Arabidopsis thaliana
  misc_feature (1)..(329): Ceres Seq. ID no. 13593118
MASSIVTSSLKPLAMADSSSSTIFSHPSISSTISSSRIRSSSVSLLTGRINLPLSFSRVSLSLKTKTHLKKSPFVSFVAQTSDWAEEGGEGSVAVEETENSLESQDVSEGDESEGDASEGDVSEGDESEGDVSEGAVSERAEFPEPSEEAKLFVGNLAYDVNSQALAMLFEQAGTVEIAEVIYNRETDQSRGFGFVTMSSVDEAETAVEKFNRYDLNGRLLTVNKAAPRGSRPERAPRVYEPAFRVYVGNLPWDVDNGRLEQLFSEHGKVVEARVVYDRETGRSRGFGFVTMSDVDELNEAISALDGQNLEGRAIRVNVAEERPPRRGY

SEQ ID NO: 32468 - protein, 315 aa, Arabidopsis thaliana
  misc_feature (1)..(315): Ceres Seq. ID no. 13593119
MADSSSSTIFSHPSISSTISSSRIRSSSVSLLTGRINLPLSFSRVSLSLKTKTHLKKSPFVSFVAQTSDWAEEGGEGSVAVEETENSLESQDVSEGDESEGDASEGDVSEGDESEGDVSEGAVSERAEFPEPSEEAKLFVGNLAYDVNSQALAMLFEQAGTVEIAEVIYNRETDQSRGFGFVTMSSVDEAETAVEKFNRYDLNGRLLTVNKAAPRGSRPERAPRVYEPAFRVYVGNLPWDVDNGRLEQLFSEHGKVVEARVVYDRETGRSRGFGFVTMSDVDELNEAISALDGQNLEGRAIRVNVAEERPPRRGY

SEQ ID NO: 32469 - DNA, 1445 bp, Arabidopsis thaliana
  misc_feature (1)..(1445): Ceres Seq. ID no. 13593120
ggcgctctcatatttctcacattttcgtagccgcaagactcctttcagattcttacttgcagctatgggtaaagagaagtttcacattaacattgtggtcattggtcatgttgattctggaaaatcgaccacaactggtcacttgatctataagcttggtggtattgacaagcgtgtcatcgagaggttcgagaaggaggctgctgagatgaacaagaggtccttcaagtacgcatgggtgttggacaaacttaaggccgagcgtgagcgtggtattaccatcgatattgctctatggaagttcgagaccaccaagtactactgcacagtcattgatgccccaggacatcgtgatttcatcaagaacatgattactggtacctcccaggctgattgtgctgttcttatcattgactccaccactggaggttttgaggctggtatctctaaggatggtcagacccgtgagcacgctcttcttgctttcacccttggtgtcaagcagatgatttgctgttgtaacaagatggatgccaccacccccaaatactccaaggctaggtacgatgaaatcatcaaggaggtgtcttcatacctgaagaaggtcggatacaaccctgacaaaatcccatttgtgccaatctctggattcgagggagacaacatgattgagaggtcaaccaaccttgactggtacaagggaccaactcttcttgaggctcttgaccagatcaacgagcccaagaggccatcagacaagccccttcgtcttccacttcaggatgtctacaagattggtggtattggaacggtgccagtgggacgtgttgagactggtatgatcaagcctggtatggttgttacctttgctcccacagggttgaccactgaggttaagtctgttgagatgcaccacgagtctcttcttgaggcacttcccggtgacaatgttggattcaatgtcaagaatgttgctgtcaaggatcttaagagaggatacgttgcctctaactccaaggatgatccagctaagggtgccgccaacttcacctcccaggtcatcatcatgaaccaccctggtcagattggtaacggttacgccccagttctcgattgccacacctctcacattgcagtcaagttctctgagatcttgaccaagattgacaggcgttctggtaaggagattgagaaggagcccaagtttttgaagaatggtgacgctggtatggttaagatgaccccaaccaagcccatggttgttgagactttctccgagtacccacctttgggacgtttcgctgttagggacatgaggcagaccgttgctgttggtgttattaagagcgtggacaagaaggacccaactggagccaaggtcaccaaggctgcagtgaagaagggtgccaaatgaactcgaatcctcaaaactctatccgcagatg

SEQ ID NO: 32470 - protein, 470 aa, Arabidopsis thaliana
  misc_feature (1)..(470): Ceres Seq. ID no. 15221202
ALSYFSHFRSRKTPFRFLLAAMGKEKFHINIVVIGHVDSGKSTTTGHLIYKLGGIDKRVIERFEKEAAEMNKRSFKYAWVLDKLKAERERGITIDIALWKFETTKYYCTVIDAPGHRDFIKNMITGTSQADCAVLIIDSTTGGFEAGISKDGQTREHALLAFTLGVKQMICCCNKMDATTPKYSKARYDEIIKEVSSYLKKVGYNPDKIPFVPISGFEGDNMIERSTNLDWYKGPTLLEALDQINEPKRPSDKPLRLPLQDVYKIGGIGTVPVGRVETGMIKPGMVVTFAPTGLTTEVKSVEMHHESLLEALPGDNVGFNVKNVAVKDLKRGYVASNSKDDPAKGAANFTSQVIIMNHPGQIGNGYAPVLDCHTSHIAVKFSEILTKIDRRSGKEIEKEPKFLKNGDAGMVKMTPTKPMVVETFSEYPPLGRFAVRDMRQTVAVGVIKSVDKKDPTGAKVTKAAVKKGAK

SEQ ID NO: 32471 - protein, 449 aa, Arabidopsis thaliana; identical to SEQ ID NO: 29942
  misc_feature (1)..(449): Ceres Seq. ID no. 15221203

SEQ ID NO: 32472 - protein, 401 aa, Arabidopsis thaliana; identical to SEQ ID NO: 29943
  misc_feature (1)..(401): Ceres Seq. ID no. 15221204

SEQ ID NO: 32473 - DNA, 1540 bp, Arabidopsis thaliana
  misc_feature (1)..(1540): Ceres Seq. ID no. 13593139
aattttgaatctgagaattcgtgcctccgatctctctccctctcgccgtggatagagatggagagcttaccaacgacggtctcagggaaatcagaccggcgaggtaggttttccaagtctcagaacacctccaagccctctcttatcttggccttcttctcttgtcttgcttggctctacgtcgctggccggttatggcaagatgcgcagtacagagcagcactcaatactgtgcttaagatgaattatgatcagaggcctaaggttcttacggtggaggacaaacttgtggtccttggatgcaaagatcttgagaggagaattgttgaaactgaaatggagttggcacaggcaaagagtcaaggctatcttaaaaaacagaaaagtgtctcttcttcagggaagaaaatgctagctgttattggagtttacacaggctttggaagtcacttgaagcgcaataaatttagaggctcttggatgccacgagatgatgctcttaaaaaacttgaggaaagaggagttgtcatacgctttgtgattggtcggagtgctaaccgaggtgatagcctagatagaaaaattgacgaagaaaatcgtgcaactaaagactttttgattcttgagaatcacgaggaagcccaagaagagttaccgaagaaagtgaagttcttctacagtgctgctgttcagaattgggacgcagagttttatgtcaaagttgatgacaacgttgacttggatcttgaggggatgattgcgcttcttgaaagtcgtcgtagtcaagatggtgcttacattgggtgcatgaaatctggagatgtgattactgaagagggaagtcaatggtatgagcctgagtggtggaaatttggggacgacaaatcgtatttccgtcatgcaactggttcgctggtaatactctcaaagaatctggctcagtatgtcaatataaacagtggattgttgaagacatatgcgtttgatgataccaccattggatcatggatgattggcgtccaggcaacatatatagacgacaatcgcctttgctgcagcagcacaagacaagaaaaagtgtgttccatggcatgatcactgcatagatgatcctcttgtcccagagcaaagacggcggtttctcatcgcattcatggcgctccgatactcttttggggcagattcttggaccggatactgaacttatcattagttttgttagaatgggagtatgattaggccattcattacagtttatgattagaggcatgcgtatcccttgagctttggagtaagaaaatggggaaatggtatagatgtgaatgaagtataatttttcctttggtatcatatcaccatcatttgtccgtccattctagcccaatctctggcaggcgtttaatgttcgaaccttaagtttgcatttttggttgctggtttttaaaaatgtgttagttaagacttaagaggacaaaagaaaatcgtctgctttaagctcataaacacttcggaccaatacgtggttaaaaatacttcattg

SEQ ID NO: 32474 - protein, 364 aa, Arabidopsis thaliana
  misc_feature (1)..(364): Ceres Seq. ID no. 13593140
NFESENSCLRSLSLSPWIEMESLPTTVSGKSDRRGRFSKSQNTSKPSLILAFFSCLAWLYVAGRLWQDAQYRAALNTVLKMNYDQRPKVLTVEDKLVVLGCKDLERRIVETEMELAQAKSQGYLKKQKSVSSSGKKMLAVIGVYTGFGSHLKRNKFRGSWMPRDDALKKLEERGVVIRFVIGRSANRGDSLDRKIDEENRATKDFLILENHEEAQEELPKKVKFFYSAAVQNWDAEFYVKVDDNVDLDLEGMIALLESRRSQDGAYIGCMKSGDVITEEGSQWYEPEWWKFGDDKSYFRHATGSLVILSKNLAQYVNINSGLLKTYAFDDTTIGSWMIGVQATYIDDNRLCCSSTRQEKVCSMA

SEQ ID NO: 32475 - protein, 345 aa, Arabidopsis thaliana
  misc_feature (1)..(345): Ceres Seq. ID no. 13593141
MESLPTTVSGKSDRRGRFSKSQNTSKPSLILAFFSCLAWLYVAGRLWQDAQYRAALNTVLKMNYDQRPKVLTVEDKLVVLGCKDLERRIVETEMELAQAKSQGYLKKQKSVSSSGKKMLAVIGVYTGFGSHLKRNKFRGSWMPRDDALKKLEERGVVIRFVIGRSANRGDSLDRKIDEENRATKDFLILENHEEAQEELPKKVKFFYSAAVQNWDAEFYVKVDDNVDLDLEGMIALLESRRSQDGAYIGCMKSGDVITEEGSQWYEPEWWKFGDDKSYFRHATGSLVILSKNLAQYVNINSGLLKTYAFDDTTIGSWMIGVQATYIDDNRLCCSSTRQEKVCSMA

SEQ ID NO: 32476 - protein, 284 aa, Arabidopsis thaliana
  misc_feature (1)..(284): Ceres Seq. ID no. 13593142
MNYDQRPKVLTVEDKLVVLGCKDLERRIVETEMELAQAKSQGYLKKQKSVSSSGKKMLAVIGVYTGFGSHLKRNKFRGSWMPRDDALKKLEERGVVIRFVIGRSANRGDSLDRKIDEENRATKDFLILENHEEAQEELPKKVKFFYSAAVQNWDAEFYVKVDDNVDLDLEGMIALLESRRSQDGAYIGCMKSGDVITEEGSQWYEPEWWKFGDDKSYFRHATGSLVILSKNLAQYVNINSGLLKTYAFDDTTIGSWMIGVQATYIDDNRLCCSSTRQEKVCSMA

SEQ ID NO: 32477 - DNA, 1805 bp, Arabidopsis thaliana
  misc_feature (1)..(1805): Ceres Seq. ID no. 13593143
actctctctctctctcacattttctcattctctcctacaacaagtttccgccgctaagccactcactacgcagccatggcaaatcctgaccatgtttcagatgtgctacataatttgtcgattgatccaacaaccaaggctttagctcctgattctgaaacaaagggggcttatggcggaaacggtaatgacttcttgctcaatgatgagttagtggaggctaccaaaattggtaaacctagtcttttgtctaaagatggaggtgtgaccaaagacaagggatccaaccttaagaaactcgggtaccaaagtgcagcttataacgcaaagggttcatatgggaagggtgcctatgcttatgggtactatcccccagcatatcagtacccaagacatggttacactgggagctatgcttcagggaaaaccaatcttcagtatcagtacctgactcagcagggaagatcagctggtaatggtcaatcttatggaggatacatggacaacatttactccaattatgggatgtgtggaccttacacgaatggctatgggtatggctcttacggttatgactcatggaaatacatgcccaattggtatgcggttaacaatacctacaagccaagaaacgggtatcatggatatggcaaagaaaacattgaggggttaaatgagatgaatagaggtccacgagctaagggtttcaacagccaagatggttccaaggtgatggctgtgtctttgaaggagcagagagtgactgagactgagaaactcagtgaagatgtgtctcttttagatcccaaggactacaataagatagatttccctgagacctacacagaagcaaagttttatgtaatcaaatcgtacagtgaagatgatattcataaaagtatcaaatacagtgtttggtccagcactcctaatggtaacaagaagctggatgcctcatataacgaggcaaaacagaagtcagatggctgtcccgtgtttctacttttctctgtaaacactagtggacaatttgttggtttagccgagatggtaggccctgttgatttcaataagactgttgaatactggcaacaggacaaatggattggttgcttccctgttaagtggcatttcgttaaagatatccctaatagctccttgaggcatataactctggagaacaatgagaacaagccggttactaatagcagagacacacaggaagtaaagctcgagcaaggcattaaagtcatcaagattttcaaggaccacgcaagcaagacatgcatcctcgatgattttgagttctatgagaatcgtcaaaagattatccaagaaaggaaaagcaaacacctgcagatcaaaaaacagacattggtggccaatgcagacaaaggtgtaatgtcaaaaattaatcttgtgaaacctcaagagtctactacagcctcagaagatgcagcagcactaggagttgcggctgaagtgactaaagaatcgaaagtggtgaaagagaccgagttacctgtggagaaaaatgctgttgctactgcctgctgaaccaacctttggttttaagtgggaactgggtgggctgttttaggctatttagagcgtttctctagttttgtttccattcctgaatttgcagacttttttttttttttttttggaaccgagttgagagggtagtggcttagtagatgaagttttggcatgagcattcatcatcttgcagttattctctatccctttagtaatggtccaacatatgaggatatgggtaaaagattggtattgaatcagct

SEQ ID NO: 32478 - protein, 493 aa, Arabidopsis thaliana
  misc_feature (1)..(493): Ceres Seq. ID no. 13593144
MANPDHVSDVLHNLSIDPTTKALAPDSETKGAYGGNGNDFLLNDELVEATKIGKPSLLSKDGGVTKDKGSNLKKLGYQSAAYNAKGSYGKGAYAYGYYPPAYQYPRHGYTGSYASGKTNLQYQYLTQQGRSAGNGQSYGGYMDNIYSNYGMCGPYTNGYGYGSYGYDSWKYMPNWYAVNNTYKPRNGYHGYGKENIEGLNEMNRGPRAKGFNSQDGSKVMAVSLKEQRVTETEKLSEDVSLLDPKDYNKIDFPETYTEAKFYVIKSYSEDDIHKSIKYSVWSSTPNGNKKLDASYNEAKQKSDGCPVFLLFSVNTSGQFVGLAEMVGPVDFNKTVEYWQQDKWIGCFPVKWHFVKDIPNSSLRHITLENNENKPVTNSRDTQEVKLEQGIKVIKIFKDHASKTCILDDFEFYENRQKIIQERKSKHLQIKKQTLVANADKGVMSKINLVKPQESTTASEDAAALGVAAEVTKESKVVKETELPVEKNAVATAC

SEQ ID NO: 32479 - protein, 352 aa, Arabidopsis thaliana
  misc_feature (1)..(352): Ceres Seq. ID no. 13593145
MDNIYSNYGMCGPYTNGYGYGSYGYDSWKYMPNWYAVNNTYKPRNGYHGYGKENIEGLNEMNRGPRAKGFNSQDGSKVMAVSLKEQRVTETEKLSEDVSLLDPKDYNKIDFPETYTEAKFYVIKSYSEDDIHKSIKYSVWSSTPNGNKKLDASYNEAKQKSDGCPVFLLFSVNTSGQFVGLAEMVGPVDFNKTVEYWQQDKWIGCFPVKWHFVKDIPNSSLRHITLENNENKPVTNSRDTQEVKLEQGIKVIKIFKDHASKTCILDDFEFYENRQKIIQERKSKHLQIKKQTLVANADKGVMSKINLVKPQESTTASEDAAALGVAAEVTKESKVVKETELPVEKNAVATAC

SEQ ID NO: 32480 - protein, 343 aa, Arabidopsis thaliana
  misc_feature (1)..(343): Ceres Seq. ID no. 13593146
MCGPYTNGYGYGSYGYDSWKYMPNWYAVNNTYKPRNGYHGYGKENIEGLNEMNRGPRAKGFNSQDGSKVMAVSLKEQRVTETEKLSEDVSLLDPKDYNKIDFPETYTEAKFYVIKSYSEDDIHKSIKYSVWSSTPNGNKKLDASYNEAKQKSDGCPVFLLFSVNTSGQFVGLAEMVGPVDFNKTVEYWQQDKWIGCFPVKWHFVKDIPNSSLRHITLENNENKPVTNSRDTQEVKLEQGIKVIKIFKDHASKTCILDDFEFYENRQKIIQERKSKHLQIKKQTLVANADKGVMSKINLVKPQESTTASEDAAALGVAAEVTKESKVVKETELPVEKNAVATAC

SEQ ID NO: 32481 - DNA, 915 bp, Arabidopsis thaliana
  misc_feature (1)..(915): Ceres Seq. ID no. 13593155
atgaaagggcttacgaggcttctcaattctctttcgcgacatacagcttccgtaacttgttctccatcttcttcttctcttctgatatcacgtcgctctctgtttatctcggcggcgacacactttccggtgaatttctcggagtcgataacaactaatgcttctcgtaactgttcgagatcttcttcatttcccttcaattggatcgagcaaaggaggacaatgtttatccaaacacaatcaacaccaaacccctcttctctaatgtttagtcctggtaaaccagttatggagattggaagtgctgacttccctaattctcgctctgctatgagttcacctttagctaaagccattttcgccattgatggtattcctcgtcttttgctacaacatacaattgtttcctcctcatataatccgtgttttgtgactaagattgtctctgttgatgcaggtgtagttcgagttttctatgggtcagattttgttactgtaacaaagtcagatgatgtaacatgggatatactcaagcctgatatctttgcagtggtaatggacttttactcttctggtcagcctttgtttctcgactcacaagctacagctgccaaggataccgctattcatgaggatgactctgaaactgtagcaatgattaaggaactcttggagacgcgtatccgaccatcagtccaagatgatggaggggacatcgagtattgtggattcgatacggaaactggtatagtgaagcttagaatgcaaggagcttgtagcggttgtccaagttcatctgttactttgaaatccggaattgagaatatgcttatgcattatgtttccgaggtcaaaggtgttgagcaagaattcgatggtgaagaggagggaacatcttctggtccaatggagtag

SEQ ID NO: 32482 - protein, 304 aa, Arabidopsis thaliana
  misc_feature (1)..(304): Ceres Seq. ID no. 13593156
MKGLTRLLNSLSRHTASVTCSPSSSSLLISRRSLFISAATHFPVNFSESITTNASRNCSRSSSFPFNWIEQRRTMFIQTQSTPNPSSLMFSPGKPVMEIGSADFPNSRSAMSSPLAKAIFAIDGIPRLLLQHTIVSSSYNPCFVTKIVSVDAGVVRVFYGSDFVTVTKSDDVTWDILKPDIFAVVMDFYSSGQPLFLDSQATAAKDTAIHEDDSETVAMIKELLETRIRPSVQDDGGDIEYCGFDTETGIVKLRMQGACSGCPSSSVTLKSGIENMLMHYVSEVKGVEQEFDGEEEGTSSGPME

SEQ ID NO: 32483 - protein, 230 aa, Arabidopsis thaliana
  misc_feature (1)..(230): Ceres Seq. ID no. 13593157
MFIQTQSTPNPSSLMFSPGKPVMEIGSADFPNSRSAMSSPLAKAIFAIDGIPRLLLQHTIVSSSYNPCFVTKIVSVDAGVVRVFYGSDFVTVTKSDDVTWDILKPDIFAVVMDFYSSGQPLFLDSQATAAKDTAIHEDDSETVAMIKELLETRIRPSVQDDGGDIEYCGFDTETGIVKLRMQGACSGCPSSSVTLKSGIENMLMHYVSEVKGVEQEFDGEEEGTSSGPME

SEQ ID NO: 32484 - protein, 216 aa, Arabidopsis thaliana
  misc_feature (1)..(216): Ceres Seq. ID no. 13593158
MFSPGKPVMEIGSADFPNSRSAMSSPLAKAIFAIDGIPRLLLQHTIVSSSYNPCFVTKIVSVDAGVVRVFYGSDFVTVTKSDDVTWDILKPDIFAVVMDFYSSGQPLFLDSQATAAKDTAIHEDDSETVAMIKELLETRIRPSVQDDGGDIEYCGFDTETGIVKLRMQGACSGCPSSSVTLKSGIENMLMHYVSEVKGVEQEFDGEEEGTSSGPME

SEQ ID NO: 32485 - DNA, 1703 bp, Arabidopsis thaliana
  misc_feature (1)..(1703): Ceres Seq. ID no. 13593159
tatcacaacacactacactctaatggctcgtgcgacggaatttcaaggctcattcctgagtcgaatcagcatccgccgtaatcagatcgtctccatggatgtcaatcacgagcaagagctcgaagaactcgagtatttccagaaacacgtagccgaacgtttctcggatttaatcacatctccatctccgcctccttcctcctcctcttccgccgtctctcagccgtctgatccgattctctcgatcccttggttacagaatcttctagatgtttttatgtcctgtgaagcagagttcaaggcggtgttgagcacgacccagatctcgaaatcgccgtctttagaaagggttttgccggaaatgcttgatcggattttaaaggcgttagatttatgtaacgccgtcgttaacgggattgattccgttagacagagccgacgttttgcggagatagctgtcacggcgcttaagcaacggccgttatgtgacggaagcgttcgtagagctaagcgtgctttaacaagtctcctcattggcttaaacgctgatgagaggagagatagaaacagtggaggaagtggttgcagtaaccaaagaaggacgacgtcacggtcttggtcgtttggaacgcgtagcaatgtcaccggaggaggattatatggccaagtcgtcagcaagaattggtctgcttcgaagcagattcaggcgatggtggccaatctggtgctgccacgtggagctgaagcttccggaccggcaatgccggtttacataatgagcagtgttatggttctggtgatgtgggtgctagtggcggcggttccttgtcagacaagcagtgttcttgtggcgccattgccgcttccaaaacaccagaattgggctagcgccgctatgagtattcaggagaggattggtgaagagataaaacggaaggagaagcgttgtggtggtggtggattgatggaggagatgcagaggatggagaagattgggttatctttaatggaattcgcggagaggtttaggtttccggcagatgaagaagaggaggtggaagttgcggagaaggtggatgagatggaggagatttgccggcgaatggaagtgggattggaggatttgcagagacaagtgaggcaagtgttccatagattggtgagaagcaggattgagattgtttcactgcttgagcaagctcctgcaatctaatcttgtaaatcctcaataacaacaaaaacttttctcttttttcttttctttggcgatttttagtcttaaaaactaatctttcaaaaatattgatgtgtataatctacaaatcgtatacgtacacaccaatgttactgtttttggtatatgatgatcactgcaaaactctattactgagattagattcatgttgctttcctgaatctgttcttctgtggctttcgtgtctcttttcctgacttgtgattgtttccagaagcttccctttgttttccgaagcttctgttaccggggcgctgtggtcctgttctactttgattaatgtcggaagcaggtgtgtgttgttgatatgttctcttttgccgtttgaatttgttgccatcttgtttggctgtagtttctgatgaagcttctctgtaatttcttttccgcggcctgtaagaaagaaccaattgttattttgtatgcatataatgagcaagcagtgatt

SEQ ID NO: 32486 - protein, 403 aa, Arabidopsis thaliana
  misc_feature (1)..(403): Ceres Seq. ID no. 13593160
ITTHYTLMARATEFQGSFLSRISIRRNQIVSMDVNHEQELEELEYFQKHVAERFSDLITSPSPPPSSSSSAVSQPSDPILSIPWLQNLLDVFMSCEAEFKAVLSTTQISKSPSLERVLPEMLDRILKALDLCNAVVNGIDSVRQSRRFAEIAVTALKQRPLCDGSVRRAKRALTSLLIGLNADERRDRNSGGSGCSNQRRTTSRSWSFGTRSNVTGGGLYGQVVSKNWSASKQIQAMVANLVLPRGAEASGPAMPVYIMSSVMVLVMWVLVAAVPCQTSSVLVAPLPLPKHQNWASAAMSIQERIGEEIKRKEKRCGGGGLMEEMQRMEKIGLSLMEFAERFRFPADEEEEVEVAEKVDEMEEICRRMEVGLEDLQRQVRQVFHRLVRSRIEIVSLLEQAPAI

SEQ ID NO: 32487 - protein, 396 aa, Arabidopsis thaliana
  misc_feature (1)..(396): Ceres Seq. ID no. 13593161
MARATEFQGSFLSRISIRRNQIVSMDVNHEQELEELEYFQKHVAERFSDLITSPSPPPSSSSSAVSQPSDPILSIPWLQNLLDVFMSCEAEFKAVLSTTQISKSPSLERVLPEMLDRILKALDLCNAVVNGIDSVRQSRRFAEIAVTALKQRPLCDGSVRRAKRALTSLLIGLNADERRDRNSGGSGCSNQRRTTSRSWSFGTRSNVTGGGLYGQVVSKNWSASKQIQAMVANLVLPRGAEASGPAMPVYIMSSVMVLVMWVLVAAVPCQTSSVLVAPLPLPKHQNWASAAMSIQERIGEEIKRKEKRCGGGGLMEEMQRMEKIGLSLMEFAERFRFPADEEEEVEVAEKVDEMEEICRRMEVGLEDLQRQVRQVFHRLVRSRIEIVSLLEQAPAI

SEQ ID NO: 32488 - protein, 372 aa, Arabidopsis thaliana
  misc_feature (1)..(372): Ceres Seq. ID no. 13593162
MDVNHEQELEELEYFQKHVAERFSDLITSPSPPPSSSSSAVSQPSDPILSIPWLQNLLDVFMSCEAEFKAVLSTTQISKSPSLERVLPEMLDRILKALDLCNAVVNGIDSVRQSRRFAEIAVTALKQRPLCDGSVRRAKRALTSLLIGLNADERRDRNSGGSGCSNQRRTTSRSWSFGTRSNVTGGGLYGQVVSKNWSASKQIQAMVANLVLPRGAEASGPAMPVYIMSSVMVLVMWVLVAAVPCQTSSVLVAPLPLPKHQNWASAAMSIQERIGEEIKRKEKRCGGGGLMEEMQRMEKIGLSLMEFAERFRFPADEEEEVEVAEKVDEMEEICRRMEVGLEDLQRQVRQVFHRLVRSRIEIVSLLEQAPAI

SEQ ID NO: 32489 - DNA, 1323 bp, Arabidopsis thaliana
  misc_feature (1)..(1323): Ceres Seq. ID no. 13593171
atggggaagaagaacaagagaagtcaagacgagtctgagctcgaattggagccagagctaacgaaaataatcgatggagactctaaaaagaagaaaaataagaataagaagaagagaagccatgaagatacggagatagaaccggagcaaaagatgagtctcgacggagactcgaaggaggagaagataaagaagaagaggaagaacaagaaccaagaggaggagccagagcttgtgacggagaaaacgaaagtccaagaggaggaaaagggaaatgtagaagagggtagagccactgttagcatagccatagctggttcaatcatccacaacactcaatcacttgagctcgccacacgcgtaatctctctttctctctatctctcccttcgtttctctgtttttccattcccagataatttaaagtccccttcttccatttctaacatttctcagctcgccggccaaattgctcgtgcagctacaattttccgaatcgacgagatcgtagtgttcgacaataagagcagctcagaaatcgaatcagctgctacgaatgcttctgatagcaatgaaagtggtgcctcctttctcgttcgtatcttgaagtatctagagacaccacaatatttgaggaaatctctcttccccaagcaaaatgatcttagatatgtgggtatgttgccacctcttgatgctcctcaccatctgcgtaagcacgagtgggaacaataccgtgaaggtgtgacactgagtgaaaaggctccaaattctgagggtacattggttgatgtgggtttaagcaagattgacctttattcgatgctcgtgatgcagagtgttgttgttgatcaagtgctgggtccaggaattagagtcacggtagccatgggaactgaccacgatttagatttggtacgccagattgttccaccctctaagccaagggaagaagcaggaatgtattggggatacaaagtacgatatgcatcacaattaagttcagtattcaaggaatgccctttcgagggtggttacgattatttgattggtacctcggagcacggcctggtaattagttcatctgagctgaaaataccaacatttaggcacctattgattgcatttggtggacttgctgggcttgaagaaagtattgaagatgataatcagtataaggggaaaaacgttcgagatgtgtttaatgtatacttgaatacttgtccacatcaaggtagccgaaccattcgagcagaggaagcgatgtttatatcacttcagtacttccaggaacccatcagcagggcagtgagaagactttaa

SEQ ID NO: 32490 - protein, 440 aa, Arabidopsis thaliana
  misc_feature (1)..(440): Ceres Seq. ID no. 13593172
MGKKNKRSQDESELELEPELTKIIDGDSKKKKNKNKKKRSHEDTEIEPEQKMSLDGDSKEEKIKKKRKNKNQEEEPELVTEKTKVQEEEKGNVEEGRATVSIAIAGSIIHNTQSLELATRVISLSLYLSLRFSVFPFPDNLKSPSSISNISQLAGQIARAATIFRIDEIVVFDNKSSSEIESAATNASDSNESGASFLVRILKYLETPQYLRKSLFPKQNDLRYVGMLPPLDAPHHLRKHEWEQYREGVTLSEKAPNSEGTLVDVGLSKIDLYSMLVMQSVVVDQVLGPGIRVTVAMGTDHDLDLVRQIVPPSKPREEAGMYWGYKVRYASQLSSVFKECPFEGGYDYLIGTSEHGLVISSSELKIPTFRHLLIAFGGLAGLEESIEDDNQYKGKNVRDVFNVYLNTCPHQGSRTIRAEEAMFISLQYFQEPISRAVRRL

SEQ ID NO: 32491 - protein, 389 aa, Arabidopsis thaliana
  misc_feature (1)..(389): Ceres Seq. ID no. 13593173
MSLDGDSKEEKIKKKRKNKNQEEEPELVTEKTKVQEEEKGNVEEGRATVSIAIAGSIIHNTQSLELATRVISLSLYLSLRFSVFPFPDNLKSPSSISNISQLAGQIARAATIFRIDEIVVFDNKSSSEIESAATNASDSNESGASFLVRILKYLETPQYLRKSLFPKQNDLRYVGMLPPLDAPHHLRKHEWEQYREGVTLSEKAPNSEGTLVDVGLSKIDLYSMLVMQSVVVDQVLGPGIRVTVAMGTDHDLDLVRQIVPPSKPREEAGMYWGYKVRYASQLSSVFKECPFEGGYDYLIGTSEHGLVISSSELKIPTFRHLLIAFGGLAGLEESIEDDNQYKGKNVRDVFNVYLNTCPHQGSRTIRAEEAMFISLQYFQEPISRAVRRL

SEQ ID NO: 32492 - DNA, 2110 bp, Arabidopsis thaliana
  misc_feature (1)..(2110): Ceres Seq. ID no. 13593198
aatctctctctgttgtgtggaaaaacgaagaaagaatgatcaagaacatcttccaaagtcggaaactctcaggtctctgtgttctctcaatcttgctcgtatcagtcacaatcctcctcttgaccaatgataccatcgatctcttcccttacttgtctctcccttatctccctcgatcttctctctccgtcatccctacctccacgccaatctcgagtcccaccaacgactcatcacctcctctggaatcaccggttaatcaaacccgagtcgatgatcatcctgatgatcaaggtttggaattggattggcttaaagatgacaaacaatggaacgtgagtttgaagatagattggaagagatgtgagagtccagattacataccgtgtttggataacacaaaagctatcaagaaacttaagtcgaagagaaacatggagcacagagagagacattgtcctgagcgttcaccaaaatgtttggttcctttgccacaacattacaaagttcctcttccttggcctcagagtagagacatggtgagagactcgtttctattttttcgatttggtatgataatgttcctcatccgaaacttgtagaatacaagaaagatcagaattgggttcgtaaatctggacctttctttgtcttccctggaggtggaactcaattcaaagacggtgttattcactacatcaacttcatacaaaagacgttacctattcttgattgggggaagaaagtaagagtggttctagatgttggttgtggtgtggctagctttggtgggactttacttgataagaacgttatcacaatgtcatttgctcctaaagacgaacacgaagctcagattcagttcgcactggaacgagggattcccgctacactcgctgttattggaactcaaaagcttccttttcctgataatgcttacgacgtaatccattgcgctagatgcagagtccattggcatggatacggtggtagaccacttttggaacttaaccgggttctaaggcctggagggttttttgtttggtcagctacaccagtttatcaacacgacgaagggcaccgtaatgtttggaaaacaatggagtctttgactacatcaatgtgttggaaagttgtggctagaactcgattcactaaagttggattcgtgatttaccagaaaccagactcagattcttgttatgaatctcgtaaaaacaaagatccgcctctctgcattgaagaagagaccaagaagaacagttcatggtacactcctctgcttacttgtctaccgaaactaccggtcagtccaatagggaaatggccttccggttggcctgagaggttaacggagacaccggttagcctctttagagagcagaggagtgaagagagtttcagagaagacagcaaactctggtctggagtcatgtctaatatctacctatatagtttagctataaactggactaggattcacaatgttatggacatgaacgctggttatggaggatttgcggctgctcttataaacaaacctctgtgggtgatgaatgtgattcctgtagaaggtgaagacacgttatcgacgatttttgatagaggtttgatagggatataccatgattggtgtgagtcgttcaatacatacccaagatcatatgatctcttgcactctagtttcctttttaccaatctttctcaaaggtgtgatttgatggaggtggtagtggaaatagaccgaatactaagaccaggagggtatcttgcggtgcaagacactgtcgaaatgctaaagaagctaaaccctattcttttatcactccgatggtcaacgaatctgtacagaggcaaattccttgttggcttgaaatcttcttggcgtccttaaacacaacattcatcattctctttaacaaatcttgttcattttcgttttgattagggctgttcaatgatttttggtgcggatactcttaatttgaagtttttttttggtttggaaagtatagccttataggaatcaagttaaacgttagattcttgtgataatgtgtcttttaactataaagtttgaagtataaatataatatttttccttccattt

SEQ ID NO: 32493 - protein, 357 aa, Arabidopsis thaliana
  misc_feature (1)..(357): Ceres Seq. ID no. 13593199
MSFAPKDEHEAQIQFALERGIPATLAVIGTQKLPFPDNAYDVIHCARCRVHWHGYGGRPLLELNRVLRPGGFFVWSATPVYQHDEGHRNVWKTMESLTTSMCWKVVARTRFTKVGFVIYQKPDSDSCYESRKNKDPPLCIEEETKKNSSWYTPLLTCLPKLPVSPIGKWPSGWPERLTETPVSLFREQRSEESFREDSKLWSGVMSNIYLYSLAINWTRIHNVMDMNAGYGGFAAALINKPLWVMNVIPVEGEDTLSTIFDRGLIGIYHDWCESFNTYPRSYDLLHSSFLFTNLSQRCDLMEVVVEIDRILRPGGYLAVQDTVEMLKKLNPILLSLRWSTNLYRGKFLVGLKSSWRP

SEQ ID NO: 32494 - protein, 264 aa, Arabidopsis thaliana
  misc_feature (1)..(264): Ceres Seq. ID no. 13593200
MESLTTSMCWKVVARTRFTKVGFVIYQKPDSDSCYESRKNKDPPLCIEEETKKNSSWYTPLLTCLPKLPVSPIGKWPSGWPERLTETPVSLFREQRSEESFREDSKLWSGVMSNIYLYSLAINWTRIHNVMDMNAGYGGFAAALINKPLWVMNVIPVEGEDTLSTIFDRGLIGIYHDWCESFNTYPRSYDLLHSSFLFTNLSQRCDLMEVVVEIDRILRPGGYLAVQDTVEMLKKLNPILLSLRWSTNLYRGKFLVGLKSSWRP

SEQ ID NO: 32495 - protein, 257 aa, Arabidopsis thaliana
  misc_feature (1)..(257): Ceres Seq. ID no. 13593201
MCWKVVARTRFTKVGFVIYQKPDSDSCYESRKNKDPPLCIEEETKKNSSWYTPLLTCLPKLPVSPIGKWPSGWPERLTETPVSLFREQRSEESFREDSKLWSGVMSNIYLYSLAINWTRIHNVMDMNAGYGGFAAALINKPLWVMNVIPVEGEDTLSTIFDRGLIGIYHDWCESFNTYPRSYDLLHSSFLFTNLSQRCDLMEVVVEIDRILRPGGYLAVQDTVEMLKKLNPILLSLRWSTNLYRGKFLVGLKSSWRP

SEQ ID NO: 32496 - DNA, 1796 bp, Arabidopsis thaliana
  misc_feature (1)..(1796): Ceres Seq. ID no. 13593202
ggaacccagaaaaaagattcataaaaccaggcaatagaaatttcatctgaagaaaagaaaaagtaaagctattaaaaatcaaagccacgagaagaaagtagaaaaagttacagtctctgtctatcaaaatcccaacggtaactgaaaatcgccggaaccgaatctgcggcgagccaaaacttgtggatcttttaatgaaaacttgaagattcctctttccacggttgcttctagggttttctcttcgattcaccacatcgtcatgaaccaaatctctttctggtgcctttctttactccttacggtggtgattgctgcagaagagactcctatcactcgtatagccttcggatcatgcgctaatcaaagtgctccacagccgatatgggatgcgataaacaagtttgatccgcaactgtttatttggttgggtgataacatctacggagatataagaagaccacttacagtcattgggaaagagagaacttttgggccatggaggaattcaccgaggtttgtaccttcttcagaggaagaaatgaaactaagatacgctaaagccaaagctaatcctggatattctcgtattcagagaaaagctaaggttattggtacatgggatgatcatgattacggattgaatgacgctggaaaagagtttgatcgtaaagtcattaaccaaaaacttatgcttgatttcttgaatgagcctcttgatagtcctaggagaaagcaagctggtgtttatgcttcttatacttatggtccgcctaatcggaaagttaaggttatagttttagatactagatatcatagagaccctttaagaagtgacgggagcatattgggtgatacgcagtgggactggctcgaaaatgaattgagcggtccccgaagcgaaatcactatcataggatcctctgttcaggtgatatcaaatctttctgctaccactggacctctcttttatatggaatcatggggtcgttttccaaaggaaaggaaacgtctttttaaactgatagcagatactaagagagatggagttatattcatcagtggagatgtacattttggagaaatcacgagatatgattgttctgttgggtacccattatatgatgtcacctccagtggtctagtacaatctgttgagaaagttgtccctcgtcccttgcgttccatagttaggcttcttttttggtatactccaagcacgatgagagttatcaatgataactgcaaattcaaatcttgcacatacggacaacaaaattttggagcaatatcgatagattggaatgcaaatccggttaccataaagctcgagatcagagatgttaacggagacactgtactaggcacgaatgtttcattatctgaactccaaccaggaggctcgaattctttaaaagatacaacaactaagggaaagtctcaacgatattgcacactcgaaattgaattaccaggaacgaccagataccgattggcagttctcatctacttcaccattgctgtcttggcaatggcgatattaggacttatcattggagctgtattggccataacagcatgcgtttataaatgcaaggtcgattgattgttgatgacattaatcaactttttttggtccaacaaaagtgtctttatgacttataatctgtattagttggattattcagggattacaattcggatgtagcttataatgttaaaaattgttgaacacatggattttgatcttgtgatgggaattctaagcttgagctgttattaattaaacttctttg

SEQ ID NO: 32497 - protein, 447 aa, Arabidopsis thaliana
  misc_feature (1)..(447): Ceres Seq. ID no. 13593203
MNQISFWCLSLLLTVVIAAEETPITRIAFGSCANQSAPQPIWDAINKFDPQLFIWLGDNIYGDIRRPLTVIGKERTFGPWRNSPRFVPSSEEEMKLRYAKAKANPGYSRIQRKAKVIGTWDDHDYGLNDAGKEFDRKVINQKLMLDFLNEPLDSPRRKQAGVYASYTYGPPNRKVKVIVLDTRYHRDPLRSDGSILGDTQWDWLENELSGPRSEITIIGSSVQVISNLSATTGPLFYMESWGRFPKERKRLFKLIADTKRDGVIFISGDVHFGEITRYDCSVGYPLYDVTSSGLVQSVEKVVPRPLRSIVRLLFWYTPSTMRVINDNCKFKSCTYGQQNFGAISIDWNANPVTIKLEIRDVNGDTVLGTNVSLSELQPGGSNSLKDTTTKGKSQRYCTLEIELPGTTRYRLAVLIYFTIAVLAMAILGLIIGAVLAITACVYKCKVD

SEQ ID NO: 32498 - protein, 354 aa, Arabidopsis thaliana
  misc_feature (1)..(354): Ceres Seq. ID no. 13593204
MKLRYAKAKANPGYSRIQRKAKVIGTWDDHDYGLNDAGKEFDRKVINQKLMLDFLNEPLDSPRRKQAGVYASYTYGPPNRKVKVIVLDTRYHRDPLRSDGSILGDTQWDWLENELSGPRSEITIIGSSVQVISNLSATTGPLFYMESWGRFPKERKRLFKLIADTKRDGVIFISGDVHFGEITRYDCSVGYPLYDVTSSGLVQSVEKVVPRPLRSIVRLLFWYTPSTMRVINDNCKFKSCTYGQQNFGAISIDWNANPVTIKLEIRDVNGDTVLGTNVSLSELQPGGSNSLKDTTTKGKSQRYCTLEIELPGTTRYRLAVLIYFTIAVLAMAILGLIIGAVLAITACVYKCKVD

SEQ ID NO: 32499 - protein, 304 aa, Arabidopsis thaliana
  misc_feature (1)..(304): Ceres Seq. ID no. 13593205
MLDFLNEPLDSPRRKQAGVYASYTYGPPNRKVKVIVLDTRYHRDPLRSDGSILGDTQWDWLENELSGPRSEITIIGSSVQVISNLSATTGPLFYMESWGRFPKERKRLFKLIADTKRDGVIFISGDVHFGEITRYDCSVGYPLYDVTSSGLVQSVEKVVPRPLRSIVRLLFWYTPSTMRVINDNCKFKSCTYGQQNFGAISIDWNANPVTIKLEIRDVNGDTVLGTNVSLSELQPGGSNSLKDTTTKGKSQRYCTLEIELPGTTRYRLAVLIYFTIAVLAMAILGLIIGAVLAITACVYKCKVD

SEQ ID NO: 32500 - DNA, 1839 bp, Arabidopsis thaliana
  misc_feature (1)..(1839): Ceres Seq. ID no. 13593206
gagtaacatcaaaatttacaaaaaacaaaaaaacatgctatctctcaaactcttcctcgtaacactcttcttatctcttcaaacactcttcattgcttctcaaactcttcttccttcttcttcaaacacttcatcaaccatctgcaaaacaacacccgatccaaaattctgcaaatcagtgttcccacaaacatctcaaggcgacgttcgcgaatacggccgcttctccctccgcaaatcgctaacgcaatcgcggaaattcacacgcaccattgacaaatacctcaaacgcaacaatgcactattatctcaatccgccgttggagctctccaagactgccgttacctagcaagcctcacaacagactatctcataacatcgttcgagaccgacaatatcactacatcatccaaaacgttgtcgttttccaaagccgacgaaatccaaacacttctctctgcggctttgactaacgagcaaacatgtcttgatggaatcaacaccgctgcttcctcttcttggactatacgaaacggtgtcgcattgcctctaatcaacgacacgaagctctttagtgtttcgctcgcattattcaccaaaggttgggttccaaagaagaagaaacaagtagccagttactcttgggcccatccaaagaacactcatagtcacacaaaaccattccgtcatttccgtaacggagctttaccgttaaagatgacggaacacacacgcgcagtttacgagtctttaagcaggaggaaactcgctgacgacgataatgacgtaaacacggtgcttgtaagcgacatcgtaacggtgaaccaaaacggaacggggaatttcacgaccataacggaagctgttaattcggcgccgaatataactgacggtaccgccggttatttcgttatctacgtgacgtcaggtgtttatgaggaaaacgtagtgattgccaaaaacaaaagatatctaatgatgattggtgacggaataaaccgtacggtggttaccggtaaccggaatgtcgtcgacggttggaccactttcaactccgccacttttgctgttacatcgccgaacttcgttgccgtgaacatgactttccgaaataccgctggaccagagaagcaccaggccgtagctatgaggagcagtgcagatctttcaatcttctatagttgcagtttcgaagcttatcaagacactttatacacacattcactaagacagttctatagagaatgtgacatttatggaacagtcgatttcatattcggcaatgcagctgttgtgttccaagactgtaatctctatccaagacaaccgatgcagaaccagttcaacgctattacagctcaaggtcgtactgatccgaatcaaaacacgggaatttcgattcacaattgtacgattaaaccggcagatgatttggtttcgagtaactatacggttaaaacgtatttgggacgaccatggaaggagtattcacgtacggtttttatgcaatcgtacatagacgaggttgttgaaccggttggttggagagaatggaacggagatttcgcattgagtacgttgtactatgctgagtataacaataccggttccggttcaagtactacagatcgagtggtttggtccggttatcatgtgattaattctacggatgcgaataatttcacagtcgagaatttcttgttaggagatggttggatggttcagagtggtgtaccttatattagtggtttactttcgtaatttcttgtatctgattatttgttttagctattattatgggtaaaaaaaaaaaaaaaaaactcgagggggggcccggt

SEQ ID NO: 32501 - protein, 586 aa, Arabidopsis thaliana
  misc_feature (1)..(586): Ceres Seq. ID no. 13593207
SNIKIYKKQKNMLSLKLFLVTLFLSLQTLFIASQTLLPSSSNTSSTICKTTPDPKFCKSVFPQTSQGDVREYGRFSLRKSLTQSRKFTRTIDKYLKRNNALLSQSAVGALQDCRYLASLTTDYLITSFETDNITTSSKTLSFSKADEIQTLLSAALTNEQTCLDGINTAASSSWTIRNGVALPLINDTKLFSVSLALFTKGWVPKKKKQVASYSWAHPKNTHSHTKPFRHFRNGALPLKMTEHTRAVYESLSRRKLADDDNDVNTVLVSDIVTVNQNGTGNFTTITEAVNSAPNITDGTAGYFVIYVTSGVYEENVVIAKNKRYLMMIGDGINRTVVTGNRNVVDGWTTFNSATFAVTSPNFVAVNMTFRNTAGPEKHQAVAMRSSADLSIFYSCSFEAYQDTLYTHSLRQFYRECDIYGTVDFIFGNAAVVFQDCNLYPRQPMQNQFNAITAQGRTDPNQNTGISIHNCTIKPADDLVSSNYTVKTYLGRPWKEYSRTVFMQSYIDEVVEPVGWREWNGDFALSTLYYAEYNNTGSGSSTTDRVVWSGYHVINSTDANNFTVENFLLGDGWMVQSGVPYISGLLS

SEQ ID NO: 32502 - protein, 575 aa, Arabidopsis thaliana
  misc_feature (1)..(575): Ceres Seq. ID no. 13593208
MLSLKLFLVTLFLSLQTLFIASQTLLPSSSNTSSTICKTTPDPKFCKSVFPQTSQGDVREYGRFSLRKSLTQSRKFTRTIDKYLKRNNALLSQSAVGALQDCRYLASLTTDYLITSFETDNITTSSKTLSFSKADEIQTLLSAALTNEQTCLDGINTAASSSWTIRNGVALPLINDTKLFSVSLALFTKGWVPKKKKQVASYSWAHPKNTHSHTKPFRHFRNGALPLKMTEHTRAVYESLSRRKLADDDNDVNTVLVSDIVTVNQNGTGNFTTITEAVNSAPNITDGTAGYFVIYVTSGVYEENVVIAKNKRYLMMIGDGINRTVVTGNRNVVDGWTTFNSATFAVTSPNFVAVNMTFRNTAGPEKHQAVAMRSSADLSIFYSCSFEAYQDTLYTHSLRQFYRECDIYGTVDFIFGNAAVVFQDCNLYPRQPMQNQFNAITAQGRTDPNQNTGISIHNCTIKPADDLVSSNYTVKTYLGRPWKEYSRTVFMQSYIDEVVEPVGWREWNGDFALSTLYYAEYNNTGSGSSTTDRVVWSGYHVINSTDANNFTVENFLLGDGWMVQSGVPYISGLLS

SEQ ID NO: 32503 - protein, 347 aa, Arabidopsis thaliana
  misc_feature (1)..(347): Ceres Seq. ID no. 13593209
MTEHTRAVYESLSRRKLADDDNDVNTVLVSDIVTVNQNGTGNFTTITEAVNSAPNITDGTAGYFVIYVTSGVYEENVVIAKNKRYLMMIGDGINRTVVTGNRNVVDGWTTFNSATFAVTSPNFVAVNMTFRNTAGPEKHQAVAMRSSADLSIFYSCSFEAYQDTLYTHSLRQFYRECDIYGTVDFIFGNAAVVFQDCNLYPRQPMQNQFNAITAQGRTDPNQNTGISIHNCTIKPADDLVSSNYTVKTYLGRPWKEYSRTVFMQSYIDEVVEPVGWREWNGDFALSTLYYAEYNNTGSGSSTTDRVVWSGYHVINSTDANNFTVENFLLGDGWMVQSGVPYISGLLS

SEQ ID NO: 32504 - DNA, 1816 bp, Arabidopsis thaliana
  misc_feature (1)..(1816): Ceres Seq. ID no. 13593246
ataaacccttttcttttaacctactcagtttttctgtttgcgtcgctctcatcccagggcgagaaagatggtgaaacggagtaaaaagagtaagagtaagagggtgaccttgaagcagaagcataaggtcctgaaaaaggtgaaggagcaccacaagaagaaggcaaaggatgctaaaaagcttggccttcaccgtaagccaagagtagagaaagacccaggtatacccaatgactggcctttcaaggaacaagagcttaaagcccttgaagttcgacgtgcccgtgctcttgaggagattgaacagaagaaagaagctcgcaaagaaagggccaaaaagaggaaacttggtttggttgatgatgaggataccaagacagaaggagagaccatagaggacttacctaaagttgtcaatgttcgagataactcggagagggctttctacaaggagctagttaaagtcattgaattgtctgatgtcattttggaggttcttgatgcccgtgatcctcttggcactcgttgtactgacatggagaggatggtgatgcaagccggtcccaataagcatcttgtgttgctgctgaacaagattgatcttgttccccgagaggctgctgagaaatggcttatgtaccttagggaagaatttccagctgttgccttcaagtgtagcacccaggaacagagatcaaacttgggttggaaatcatctaaggcatcaaaaccaagcaatatgttgcagacgagtgattgtcttggagcagacactcttatcaaattgttgaagaactactcaagaagtcatgagttaaaaaaatctatcacagttggtattattggactgcctaatgtcggcaagagtagtcttattaacagtctgaagagagcgcatgttgtcaatgttggtgccactcctggactgactagatctctgcaagaggttcacttggacaaaaacgtgaagttgctggattgtcctggagttgtgatgttgaaatcatcaggaaatgatgcttccatagctctccgaaattgtaaaagaatcgagaagttggatgacccagttagtccagtgaaggaaattctcaagctttgtcctaaagatatgctggtgactctctacaaaatcccgagcttcgaggcagttgatgatttcctttacaaagtcgccactgtaaggggtaaacttaaaaagggtggtcttgtggatattgatgctgctgccagaattgttttgcatgactggaatgaaggtaaaatcccatactatacaatgccgccaaagagggaccagggtggacatgcagagtcaaagattgtgactgagctggccaaggatttcaacatcgatgaggtttacagtggtgaatcctctttcattgggagcttgaagacggttaacgaattcaaccctgttattattccttcaaatggtcctctcaatttcgatgaaactatgatcgaggatgagtctaagacgcagacggaagaggaggctgagcatgagagtgatgatgatgagtcaatgggaggggaggaggaggaagaggcaggaaagacgaaggagaaatcagagacggggaggcagaacgtgaagctatacgcagcggaaagcatgttgaatacaaagaaacagaaagcagagaagaagaagaggaagaaagcaaagaaagcaggagctgatgaggaggatctgatggacggagattatgatttcaaagtggattataggaagaacaaagatggagaagacgaagaattccagattgatgctaaaatcccaatggctggacttttgcctgaagaatga

SEQ ID NO: 32505 - protein, 582 aa, Arabidopsis thaliana
  misc_feature (1)..(582): Ceres Seq. ID no. 13593247
MVKRSKKSKSKRVTLKQKHKVLKKVKEHHKKKAKDAKKLGLHRKPRVEKDPGIPNDWPFKEQELKALEVRRARALEEIEQKKEARKERAKKRKLGLVDDEDTKTEGETIEDLPKVVNVRDNSERAFYKELVKVIELSDVILEVLDARDPLGTRCTDMERMVMQAGPNKHLVLLLNKIDLVPREAAEKWLMYLREEFPAVAFKCSTQEQRSNLGWKSSKASKPSNMLQTSDCLGADTLIKLLKNYSRSHELKKSITVGIIGLPNVGKSSLINSLKRAHVVNVGATPGLTRSLQEVHLDKNVKLLDCPGVVMLKSSGNDASIALRNCKRIEKLDDPVSPVKEILKLCPKDMLVTLYKIPSFEAVDDFLYKVATVRGKLKKGGLVDIDAAARIVLHDWNEGKIPYYTMPPKRDQGGHAESKIVTELAKDFNIDEVYSGESSFIGSLKTVNEFNPVIIPSNGPLNFDETMIEDESKTQTEEEAEHESDDDESMGGEEEEEAGKTKEKSETGRQNVKLYAAESMLNTKKQKAEKKKRKKAKKAGADEEDLMDGDYDFKVDYRKNKDGEDEEFQIDAKIPMAGLLPEE

SEQ ID NO: 32506 - protein, 426 aa, Arabidopsis thaliana
  misc_feature (1)..(426): Ceres Seq. ID no. 13593248
MERMVMQAGPNKHLVLLLNKIDLVPREAAEKWLMYLREEFPAVAFKCSTQEQRSNLGWKSSKASKPSNMLQTSDCLGADTLIKLLKNYSRSHELKKSITVGIIGLPNVGKSSLINSLKRAHVVNVGATPGLTRSLQEVHLDKNVKLLDCPGVVMLKSSGNDASIALRNCKRIEKLDDPVSPVKEILKLCPKDMLVTLYKIPSFEAVDDFLYKVATVRGKLKKGGLVDIDAAARIVLHDWNEGKIPYYTMPPKRDQGGHAESKIVTELAKDFNIDEVYSGESSFIGSLKTVNEFNPVIIPSNGPLNFDETMIEDESKTQTEEEAEHESDDDESMGGEEEEEAGKTKEKSETGRQNVKLYAAESMLNTKKQKAEKKKRKKAKKAGADEEDLMDGDYDFKVDYRKNKDGEDEEFQIDAKIPMAGLLPEE

SEQ ID NO: 32507 - protein, 423 aa, Arabidopsis thaliana
  misc_feature (1)..(423): Ceres Seq. ID no. 13593249
MVMQAGPNKHLVLLLNKIDLVPREAAEKWLMYLREEFPAVAFKCSTQEQRSNLGWKSSKASKPSNMLQTSDCLGADTLIKLLKNYSRSHELKKSITVGIIGLPNVGKSSLINSLKRAHVVNVGATPGLTRSLQEVHLDKNVKLLDCPGVVMLKSSGNDASIALRNCKRIEKLDDPVSPVKEILKLCPKDMLVTLYKIPSFEAVDDFLYKVATVRGKLKKGGLVDIDAAARIVLHDWNEGKIPYYTMPPKRDQGGHAESKIVTELAKDFNIDEVYSGESSFIGSLKTVNEFNPVIIPSNGPLNFDETMIEDESKTQTEEEAEHESDDDESMGGEEEEEAGKTKEKSETGRQNVKLYAAESMLNTKKQKAEKKKRKKAKKAGADEEDLMDGDYDFKVDYRKNKDGEDEEFQIDAKIPMAGLLPEE

SEQ ID NO: 32508 - DNA, 963 bp, Arabidopsis thaliana
  misc_feature (1)..(963): Ceres Seq. ID no. 13593265
atggaagatctatggaagagagcgaaatcgtttgcagaagaagcagcgaagaaatcacaaaccataacactacaatcatcttcaacaacattcgtcaatctcgtcaccgaaaccgctaaaaaatccaaagagttcgctctcgaagcttctaagaaagctgattcgatcaatgtctccgagttcgtcgccgagacggcgaagaagtcaaaggaattcgctgctgaggtttcaacgaaagcggatcagctcaaagtcgtagcattgaaacaagctgatcagatccagaatataaaatcgattgccgacattatacctggaggattaggaggatcaggatctggtggtggtggttctgagatttctgaatctgagcttgttagttttggtattactgatgatttgagagagtttgttaaaggtttgacatctgctacgttccaggcttttcctgaacaaggatttgaaatgtgttatggtaaatgtggattagatgaatcgtcggaagtttctgatttggaaacaagtgcgtcgaatgttcggaaggatctttctgagtggcaggagagacatgccactcttgttcttggttctgtcaagcaaatttcgaagttgagatatgaactatgcccacgagttatgaaagaaaggaggttctggaggatatactttaccttagtgagcactcatgttgcaccatatgaaaggaagtacatggaggaacttaggaacaaagcagagagtaaagatgaagaagctaagaagagtccagggcttggaaggacagaatcagctgaaaagaacagaatatctactgcatcgtctgagcaagatctcgatacattcctgctgggagatctagaagacagtgacgaagctcctgatgatggtgatggtgatgatggaggaagcctgggtgatgatgactttgacaagattggcaactctgtaagtgaaaacgtttga

SEQ ID NO: 32509 - protein, 320 aa, Arabidopsis thaliana
  misc_feature (1)..(320): Ceres Seq. ID no. 13593266
MEDLWKRAKSFAEEAAKKSQTITLQSSSTTFVNLVTETAKKSKEFALEASKKADSINVSEFVAETAKKSKEFAAEVSTKADQLKVVALKQADQIQNIKSIADIIPGGLGGSGSGGGGSEISESELVSFGITDDLREFVKGLTSATFQAFPEQGFEMCYGKCGLDESSEVSDLETSASNVRKDLSEWQERHATLVLGSVKQISKLRYELCPRVMKERRFWRIYFTLVSTHVAPYERKYMEELRNKAESKDEEAKKSPGLGRTESAEKNRISTASSEQDLDTFLLGDLEDSDEAPDDGDGDDGGSLGDDDFDKIGNSVSENV

SEQ ID NO: 32510 - protein, 165 aa, Arabidopsis thaliana
  misc_feature (1)..(165): Ceres Seq. ID no. 13593267
MCYGKCGLDESSEVSDLETSASNVRKDLSEWQERHATLVLGSVKQISKLRYELCPRVMKERRFWRIYFTLVSTHVAPYERKYMEELRNKAESKDEEAKKSPGLGRTESAEKNRISTASSEQDLDTFLLGDLEDSDEAPDDGDGDDGGSLGDDDFDKIGNSVSENV

SEQ ID NO: 32511 - DNA, 2876 bp, Arabidopsis thaliana
  misc_feature (1)..(2876): Ceres Seq. ID no. 13593268
agttttaaaaaacgaatatcaaatcaacgctaacaaagtttgattttttgcttccatcttcttcccctccttaagttttcaaatctattcatcaaattttcttttgtctttcccttaagattcccgggaaagccaaggaaaaacgctagaagaaaattaacataataatgttaattgttgcttaaaccttccagctcaagtttggtagtaagtaagcagacatttaatcccccaagaagcaattgaagaagacttttaattcttctgaattttctttccaaaaacccctttttagaaaattggttgcatcatagagattggttcatttattcccaccggagaagatcatcaaattcgtcttctcacctatatcgccgacgacattcttcacgttggaaaaaaacaaagcaaaaccctagaaatagtggctgatgaggtcgcgaggcgatgtctctgaagcagaaggtacgagatcagatgctggttcttcaagaagcgaagaagaaacgagtctgaaggagaaacactcaaattcgcgagctgggtctcaaagatctggaaaaagcttgagaaatgacgagcctaattacggatcagattcttcatctaagaacacaagcagcagcaacaaccctattgagtatacagagcatgaacgagctgagcttttaagaaggttagattctatcaaagatcatctacttcgcggtggtggtggtggtaataatgtagttgataaacctaaagaaccagatcagaatcagcctttccttagaccagttcatcttcatggtcatgctaatcataatcctggtccttcttattaccatcagtatccagaacctattcaataccctggaccggttcatggaatgtatcctcaagcttatcaagatccttatgggtaccaaagaagaccacctccagttcctaatccaaactggtatcctcctggtcattaccctaatcagatggctcgtcagtatcctggaggtcaatatgttgaacttggtcctgatatagttgagccacattcttactatccagctactcctggtaggtacggtgacctgcctccgtatagcccggtttcgtctcaccatcgtgaagagaaactcgctacacagtacagtgatatgcctccgtatagcccggtttcgtctcaccatcgtggcgagaaactcacgacaccgtatagtccacgtgttaataacggttcgagttttccttcttcgatgggcactccaggtcctcgaggtggttatgcaaggtggccgagtgaacatgattctgaaatgggcggtgcttttgctcgtgggtatgttaagaaagctgtatcggatactggtgttcgacgttgtcatcctcttgctggtggtgctccttttatagcttgtcatagttgctttgagctgctttacttgcctaagaagaagcttttgtctcaggaaaggttacataagctgcagtgcggtgcttgttctgaagttattagtttcacaatcgttgataggaaactcgttttctcttctggtaatgaggaaacaaaaccggtctctctagaggttgaagatagaaacacaacaaacacagtagtgatagaggaggaagtctcttctgttgatttcaacagctcaggtagagatattccacgtaaggatgaagaagaaccagtgcaagaactgagaaatcatcaggatactattactacgcaaagcgtccgctctgaatctcaacactcagatgatgaagaaagatcgagcaattctagtgaacaacaacagaaggaggtcaaatctgttcgtcggcgaggtaaagggtcaaaagcacctgaacccgctgctcctgataatgccagtctccttgaactttttgagtattctaatgtaaacagagctgcactcgcttatggaatggcgcagttaggttatgaaaagccagataagcaaaagtctttcatgacacaggactcgctgaaaccagaatcagtagctacagagacagaggtttcttacaatggatactctaacaccgagatctcagaagattcaaggtactcaaacagaaagggtagtgagtacggttcgacagagatcacaacgaggtcctctactgatcaaaacgaagaccagatgaagtcattagaggtttgggttaatggacatcttataccagaagatcttgttagcagtgctgagaaattagctggaccaatccaagctggaaagtattggtatgattaccgagctgggttctggggagtgatgggcaaaccgtgtctcggtataatacctccatttattgaagagtttagccatccaatgctggataactgcgctgcaggaaacacagacgtgtttgtgaatggaagagagcttcacaagagagatttcgagttacttgtgggtcgtggtctgcctagagacaagaaccgttcttacattgttgatatatcaggaagaatccttgatcaagattcaggagaagaacttcacagccttggcaaattagccccaacgattgagaaagtgaagcatggatttggtatgagagttccaagatcattagcttcatgaaaactccccctagtaacaactacacaaccaaaatatgattctgcttcttgtttccatcttcatattatttatttgttaaacacaactgtaaagtgttttttacatcttgattttgatttttggtattctttttaaaatatctttggggaaatgtctgtatgttttttattgcgaccagaaccggtttaggggttatagactgtatacaaaccgggttctctcggtacaaggtttgtgctttgtattatttccatttttttatggaatgatattagtttgctcttaatgactttttttttt

SEQ ID NO: 32512 - protein, 714 aa, Arabidopsis thaliana
  misc_feature (1)..(714): Ceres Seq. ID no. 13593269
MRSRGDVSEAEGTRSDAGSSRSEEETSLKEKHSNSRAGSQRSGKSLRNDEPNYGSDSSSKNTSSSNNPIEYTEHERAELLRRLDSIKDHLLRGGGGGNNVVDKPKEPDQNQPFLRPVHLHGHANHNPGPSYYHQYPEPIQYPGPVHGMYPQAYQDPYGYQRRPPPVPNPNWYPPGHYPNQMARQYPGGQYVELGPDIVEPHSYYPATPGRYGDLPPYSPVSSHHREEKLATQYSDMPPYSPVSSHHRGEKLTTPYSPRVNNGSSFPSSMGTPGPRGGYARWPSEHDSEMGGAFARGYVKKAVSDTGVRRCHPLAGGAPFIACHSCFELLYLPKKKLLSQERLHKLQCGACSEVISFTIVDRKLVFSSGNEETKPVSLEVEDRNTTNTVVIEEEVSSVDFNSSGRDIPRKDEEEPVQELRNHQDTITTQSVRSESQHSDDEERSSNSSEQQQKEVKSVRRRGKGSKAPEPAAPDNASLLELFEYSNVNRAALAYGMAQLGYEKPDKQKSFMTQDSLKPESVATETEVSYNGYSNTEISEDSRYSNRKGSEYGSTEITTRSSTDQNEDQMKSLEVWVNGHLIPEDLVSSAEKLAGPIQAGKYWYDYRAGFWGVMGKPCLGIIPPFIEEFSHPMLDNCAAGNTDVFVNGRELHKRDFELLVGRGLPRDKNRSYIVDISGRILDQDSGEELHSLGKLAPTIEKVKHGFGMRVPRSLAS

SEQ ID NO: 32513 - protein, 567 aa, Arabidopsis thaliana
  misc_feature (1)..(567): Ceres Seq. ID no. 13593270
MYPQAYQDPYGYQRRPPPVPNPNWYPPGHYPNQMARQYPGGQYVELGPDIVEPHSYYPATPGRYGDLPPYSPVSSHHREEKLATQYSDMPPYSPVSSHHRGEKLTTPYSPRVNNGSSFPSSMGTPGPRGGYARWPSEHDSEMGGAFARGYVKKAVSDTGVRRCHPLAGGAPFIACHSCFELLYLPKKKLLSQERLHKLQCGACSEVISFTIVDRKLVFSSGNEETKPVSLEVEDRNTTNTVVIEEEVSSVDFNSSGRDIPRKDEEEPVQELRNHQDTITTQSVRSESQHSDDEERSSNSSEQQQKEVKSVRRRGKGSKAPEPAAPDNASLLELFEYSNVNRAALAYGMAQLGYEKPDKQKSFMTQDSLKPESVATETEVSYNGYSNTEISEDSRYSNRKGSEYGSTEITTRSSTDQNEDQMKSLEVWVNGHLIPEDLVSSAEKLAGPIQAGKYWYDYRAGFWGVMGKPCLGIIPPFIEEFSHPMLDNCAAGNTDVFVNGRELHKRDFELLVGRGLPRDKNRSYIVDISGRILDQDSGEELHSLGKLAPTIEKVKHGFGMRVPRSLAS

SEQ ID NO: 32514 - protein, 534 aa, Arabidopsis thaliana
  misc_feature (1)..(534): Ceres Seq. ID no. 13593271
MARQYPGGQYVELGPDIVEPHSYYPATPGRYGDLPPYSPVSSHHREEKLATQYSDMPPYSPVSSHHRGEKLTTPYSPRVNNGSSFPSSMGTPGPRGGYARWPSEHDSEMGGAFARGYVKKAVSDTGVRRCHPLAGGAPFIACHSCFELLYLPKKKLLSQERLHKLQCGACSEVISFTIVDRKLVFSSGNEETKPVSLEVEDRNTTNTVVIEEEVSSVDFNSSGRDIPRKDEEEPVQELRNHQDTITTQSVRSESQHSDDEERSSNSSEQQQKEVKSVRRRGKGSKAPEPAAPDNASLLELFEYSNVNRAALAYGMAQLGYEKPDKQKSFMTQDSLKPESVATETEVSYNGYSNTEISEDSRYSNRKGSEYGSTEITTRSSTDQNEDQMKSLEVWVNGHLIPEDLVSSAEKLAGPIQAGKYWYDYRAGFWGVMGKPCLGIIPPFIEEFSHPMLDNCAAGNTDVFVNGRELHKRDFELLVGRGLPRDKNRSYIVDISGRILDQDSGEELHSLGKLAPTIEKVKHGFGMRVPRSLAS

SEQ ID NO: 32515 - DNA, 1896 bp, Arabidopsis thaliana
  misc_feature (1)..(1896): Ceres Seq. ID no. 13593272
accggaaaataatgctgctccggtcatttcgcaccgtcgagcttctccgccgaatctccacttcttcagtctctggatatcgaacttctccttcacttttacaacgttgcaatggcttccaaagctatttaccacacagagtaacaacaacagagagtcctttcccttcacacatctctcgattctgttcttctcagagcgcgaattcgcaaaatgagaatcgacacacgactctatcatcaccggtttcttcacggagggttaataacagaaagatttcacggcggaggaaggcgggaaaatcattatcaatctcgccggcggcggatgcggttgatttggcgttagactcagtggtgaagatctttactgtttctacaagtcctagttactttcttccttggcagaataagtctcaacgagaatctatgggctctggatttgtgatttctggaaggaagattataacgaatgcgcatgtcgtggctgatcactcctttgtgttagttagaaagcatggatcgtcgataaaacacagagcagaagttcaagcggttggtcatgaatgtgatttggctatattggtagttgatagtgaagtgttttgggaaggtatgaatgctttggagctaggagatataccgtttcttcaggaagctgtggctgtagttggctatcctcaaggtggtgacaacatttctgttacaaaaggtgttgtgtctcgagttgaaccgacacaatatgttcacggtgccacccagctaatggctatacaaatagatgctgctattaaccccggaaatagtggtggcccagctatcatgggaaacaaagtagctggtgtcgcatttcaaaatctttcaggtgctgagaatataggctatataattccaacaccagtgataaagcatttcataaatggcgttgaagaatgtggtaaatacattggtttttgttcaatgggtgtatcatgtcagcctatggagaatggtgaacttcgtagtggttttcagatgagttctgaaatgacaggggttcttgttagcaaaataaaccctctatcagatgctcacaaaattttgaagaaagatgatgttcttcttgcatttgatggtgttcctatagcaaatgatggaacagttccttttcggaacagggagagaatcactttcgaccatttggtttctatgaagaaaccagatgaaacagccttggttaaagttttgagagaggggaaagaacatgaattcagtatcacactaagacctctgcaaccactagttccagtgcatcaatttgatcagcttcccagttattatatatttgcgggcttcgtatttgtacctcttactcagccataccttcatgaatatggagaagattggtataacacttctccccgcacattgtgccatcgtgcattaaaagatttgcccaaaaaagccggtcaacaacttgtcattgtctctcaggtgttaatggatgatatcaacacaggatacgagcgtctcgcagaactacaagtgaataaagtgaacggagtagaagtgaataatctgagacatctatgtcagctcatagagaactgcaacaccgaaaagctgaggatagacttagacgatgagagtagggtaatcgtcttgaactaccaatccgcaaaaattgccacttctttgattttgaaacgacacagaatagcatcagcgatttccagcgatctgcttatcgaacaaaatctagaaaccgagttggcttcttgttctgcggtttgagctatcgccaacacgtatggcatgttgtacacttacaaattcattcataatttgtaaactacaatgttgtatactcataaacatttaggatttgataagtggcttgtcacgagcctgaattttg

SEQ ID NO: 32516 - protein, 589 aa, Arabidopsis thaliana
  misc_feature (1)..(589): Ceres Seq. ID no. 13593273
RKIMLLRSFRTVELLRRISTSSVSGYRTSPSLLQRCNGFQSYLPHRVTTTESPFPSHISRFCSSQSANSQNENRHTTLSSPVSSRRVNNRKISRRRKAGKSLSISPAADAVDLALDSVVKIFTVSTSPSYFLPWQNKSQRESMGSGFVISGRKIITNAHVVADHSFVLVRKHGSSIKHRAEVQAVGHECDLAILVVDSEVFWEGMNALELGDIPFLQEAVAVVGYPQGGDNISVTKGVVSRVEPTQYVHGATQLMAIQIDAAINPGNSGGPAIMGNKVAGVAFQNLSGAENIGYIIPTPVIKHFINGVEECGKYIGFCSMGVSCQPMENGELRSGFQMSSEMTGVLVSKINPLSDAHKILKKDDVLLAFDGVPIANDGTVPFRNRERITFDHLVSMKKPDETALVKVLREGKEHEFSITLRPLQPLVPVHQFDQLPSYYIFAGFVFVPLTQPYLHEYGEDWYNTSPRTLCHRALKDLPKKAGQQLVIVSQVLMDDINTGYERLAELQVNKVNGVEVNNLRHLCQLIENCNTEKLRIDLDDESRVIVLNYQSAKIATSLILKRHRIASAISSDLLIEQNLETELASCSAV

SEQ ID NO: 32517 - protein, 586 aa, Arabidopsis thaliana
  misc_feature (1)..(586): Ceres Seq. ID no. 13593274
MLLRSFRTVELLRRISTSSVSGYRTSPSLLQRCNGFQSYLPHRVTTTESPFPSHISRFCSSQSANSQNENRHTTLSSPVSSRRVNNRKISRRRKAGKSLSISPAADAVDLALDSVVKIFTVSTSPSYFLPWQNKSQRESMGSGFVISGRKIITNAHVVADHSFVLVRKHGSSIKHRAEVQAVGHECDLAILVVDSEVFWEGMNALELGDIPFLQEAVAVVGYPQGGDNISVTKGVVSRVEPTQYVHGATQLMAIQIDAAINPGNSGGPAIMGNKVAGVAFQNLSGAENIGYIIPTPVIKHFINGVEECGKYIGFCSMGVSCQPMENGELRSGFQMSSEMTGVLVSKINPLSDAHKILKKDDVLLAFDGVPIANDGTVPFRNRERITFDHLVSMKKPDETALVKVLREGKEHEFSITLRPLQPLVPVHQFDQLPSYYIFAGFVFVPLTQPYLHEYGEDWYNTSPRTLCHRALKDLPKKAGQQLVIVSQVLMDDINTGYERLAELQVNKVNGVEVNNLRHLCQLIENCNTEKLRIDLDDESRVIVLNYQSAKIATSLILKRHRIASAISSDLLIEQNLETELASCSAV

SEQ ID NO: 32518 - protein, 447 aa, Arabidopsis thaliana
  misc_feature (1)..(447): Ceres Seq. ID no. 13593275
MGSGFVISGRKIITNAHVVADHSFVLVRKHGSSIKHRAEVQAVGHECDLAILVVDSEVFWEGMNALELGDIPFLQEAVAVVGYPQGGDNISVTKGVVSRVEPTQYVHGATQLMAIQIDAAINPGNSGGPAIMGNKVAGVAFQNLSGAENIGYIIPTPVIKHFINGVEECGKYIGFCSMGVSCQPMENGELRSGFQMSSEMTGVLVSKINPLSDAHKILKKDDVLLAFDGVPIANDGTVPFRNRERITFDHLVSMKKPDETALVKVLREGKEHEFSITLRPLQPLVPVHQFDQLPSYYIFAGFVFVPLTQPYLHEYGEDWYNTSPRTLCHRALKDLPKKAGQQLVIVSQVLMDDINTGYERLAELQVNKVNGVEVNNLRHLCQLIENCNTEKLRIDLDDESRVIVLNYQSAKIATSLILKRHRIASAISSDLLIEQNLETELASCSAV

SEQ ID NO: 32519 - DNA, 3801 bp, Arabidopsis thaliana
  misc_feature (1)..(3801): Ceres Seq. ID no. 13593288
atggcggttcctgtagaggaagcaatcgcagctctttccacattctccttagaggatgagcaaccagaagtccaaggaccggctgtgatggtttcagctgaaagagcagcaaccgatagtcccatcgaatatagtgacgtcgctgcataccggttgtctctatcagaagacacaaaagctcttaaccagctgaatacacttatacaagaaggaaaagagatggcgtcaattctatacacatatagaagttgtgtcaaagcactgcctcagcttcccgaatctatgaagcatagtcaagcggatttgtatctagaaacatatcaagttttggacttagaaatgagccgtttacgcgaaattcaaagatggcaatcgtcggcttcagctaaattagctgctgacatgcagcggttttccagacctgaacggcggatcaatggtcccacagtcacacatctttggtcaatgctaaagttgcttgacgtcttggttcagctggatcatcttaaaaatgctaaagctagcattcctaatgatttctcttggtataagagaacattcactcaagtcagtgcgcagtggcaagatacagatacaatgagagaagagttagacgacttgcagatcttcctgagcacaagatgggctattttactcaacctgcacgttgagatgttccgtgtaaacaaatatgcatgctgctcaagtcccttgtgccatttgactatattgcaagcttttggattccttagtaaattcagtgtggaagatattctccaagttctcatagtcttcatcgtggagtctctggagttggattttgcactactttttcctgagcggtatattcttctccgggttctacctgttcttgttgtcttagcaacaccatctgagaaagataccgaggctttatacaagagggtaaaactcaacagattgataaacattttcaagaatgatcctgtcattcctgcgtttccagatctccatctttctcctgctgcaattttgaaagaattgtcgaggcactatttgatagtcaatcacattggagctctccgtgctgagcatgacgatttcacaatccgatttgcttcatccatgaatcagttattgctgttgaagtcaaacgatggagcatatactgaatggtgcagagaggtcaaaggaaacatgtacgatatggttgttgaaggtttccaactgttaagtagatggacagcacgcatttgggagcaatgtgcttggaaattctctcgcccatgtagggatgcaggagagactcctgaagcctccggatcatattctgattacgagaaggtggtgaggttcaattatactgcagaagaaaggaaagccttggtagaacttgttggctatataaagagtgtaggatcgatgctgcagcgctgtgacacattagttgcagatgctttatgggagacaatacatgccgaagttcaagattttgtacagaacacgttagccacaatgttgcgtaccaccttccgaaagaagaaagatctctcaaggattctttctgatatgcggacactttcagctgactggatggcaaataccaggcccgaacatgagatgccatcttcacaacatggaaatgatgaaagcagagggaatttcttttatccgaggcctgttgccccaacagcagcacaggtgcattgcttgcagtttttgatatatgaggttgtctctggtggaaatctgaggaggccagggggattctttggaaataatggctctgagattcctctttgtaagctgactcctcaacttcaatttacgatggctgcagcaagtattggaatattgactgatctggggttcctgtggtttagagaattttacctggagtcttcacgtgttattcagttcccgattgagtgttcactaccatggatgctgatagactacattctggaagcccagaattcaggccttcttgagagtgttctgctaccttttgacatttataatgactcagctcaacaagctctggttgttctgaggcagagattcctctatgatgaaattgaagctgaggtggaccatggttttgatatatttgtttcaaggctctcggagtctatattcacatattacaagagttggtcagcaagtgagcttcttgatccatcatttctctttgccttggacaatggtgaaaagttctccatccagcctgtgaggtttactgcgttatttaagatgacaaaagtaaagatacttggtagaacaattaatttaagaagtttgatcgctcaaaggatgaatagaatctttagagagaatctggagtttctttttgaccgttttgagtcccaggacctatgtgctgtagtggaactggagaagctgatagatatcctaaagcactcgcatgaattgctttcacaagatctttccatagaccctttcagtctcatgttgaatgaaatgcaagaaaacatatctcttgtctcattttcaagtcgacttgctacacagatttggtcagagatgcagagtgatttcctaccaaacttcattctttgcaataccactcagcgatttgtccgttcatcgaaagttcctcctactcagaaaccatcagtgccttctgctaagcctagtttctattgtggcactcaagacttaaatgcagcgcatcaaagttttgcacgattgcatagtggatttttcgggataccacatttattttccatagttaaacttcttgggtccagatcattgccttggctaataagagctttactggaccatatatcaaataagataacaacacttgagccaatgatctctggattgcaagaagcattgcccaagtccattggattgctttcttttgatggtggtgttacaggttgtatgaagcttatacgagagcaactaaactggggcactaagtcagaactcaaatcagaagttctacgaggaataaaggaaattggaagtgtgatatatacaatgggacttctcgatatcgtattgagagaggtagacacaaagcggttcatgcaaacagctccatggttgggattaatcccaggtgctgaaggacagatagttaatgctcaagacggcgaaagccctcttgtcaatctcttaaagtcagcaacttctgcagttgtatcaagtccaggttgtcttaatccagctgcgttctataccatgtccaaacaggcagaagctgcagatcttttgtacaaggcaaacatgaacggtgggagtgttcttgaatacacacttgcattcacaagtgcgtcgctcgacaaatattgcagtaaatggagtgctcctccaaagactggcttcgttgatattacaacttcaaaggatttttaccgtatatacggtggtcttcagattggatatctagaggagataacagctccacagtcagctcaacatgaagtcctcggtgattcaatagcttggggtggttgcaccattatttacttgctcggccagcaacttcactttgagttgtttgatttctcgtaccaagtactcaatgtctctgaggttgaaactgtctctgcttcacatacccataggaatccacaaatccatcagggatgggaaggtttgttggaagggatgaagaaagctcggaggctgaacaaccatgtcttctccatgcttaaagctcgttgtcctctagaagacaaaacggcatgtgccatcaaacagagcggcgcaccgctgccacgtgtcaggtttgagaataccgtgtctgctttcgagactctacctcagaaaggcaccgttggctga

SEQ ID NO: 32520 - protein, 1266 aa, Arabidopsis thaliana
  misc_feature (1)..(1266): Ceres Seq. ID no. 13593289
MAVPVEEAIAALSTFSLEDEQPEVQGPAVMVSAERAATDSPIEYSDVAAYRLSLSEDTKALNQLNTLIQEGKEMASILYTYRSCVKALPQLPESMKHSQADLYLETYQVLDLEMSRLREIQRWQSSASAKLAADMQRFSRPERRINGPTVTHLWSMLKLLDVLVQLDHLKNAKASIPNDFSWYKRTFTQVSAQWQDTDTMREELDDLQIFLSTRWAILLNLHVEMFRVNKYACCSSPLCHLTILQAFGFLSKFSVEDILQVLIVFIVESLELDFALLFPERYILLRVLPVLVVLATPSEKDTEALYKRVKLNRLINIFKNDPVIPAFPDLHLSPAAILKELSRHYLIVNHIGALRAEHDDFTIRFASSMNQLLLLKSNDGAYTEWCREVKGNMYDMVVEGFQLLSRWTARIWEQCAWKFSRPCRDAGETPEASGSYSDYEKVVRFNYTAEERKALVELVGYIKSVGSMLQRCDTLVADALWETIHAEVQDFVQNTLATMLRTTFRKKKDLSRILSDMRTLSADWMANTRPEHEMPSSQHGNDESRGNFFYPRPVAPTAAQVHCLQFLIYEVVSGGNLRRPGGFFGNNGSEIPLCKLTPQLQFTMAAASIGILTDLGFLWFREFYLESSRVIQFPIECSLPWMLIDYILEAQNSGLLESVLLPFDIYNDSAQQALVVLRQRFLYDEIEAEVDHGFDIFVSRLSESIFTYYKSWSASELLDPSFLFALDNGEKFSIQPVRFTALFKMTKVKILGRTINLRSLIAQRMNRIFRENLEFLFDRFESQDLCAVVELEKLIDILKHSHELLSQDLSIDPFSLMLNEMQENISLVSFSSRLATQIWSEMQSDFLPNFILCNTTQRFVRSSKVPPTQKPSVPSAKPSFYCGTQDLNAAHQSFARLHSGFFGIPHLFSIVKLLGSRSLPWLIRALLDHISNKITTLEPMISGLQEALPKSIGLLSFDGGVTGCMKLIREQLNWGTKSELKSEVLRGIKEIGSVIYTMGLLDIVLREVDTKRFMQTAPWLGLIPGAEGQIVNAQDGESPLVNLLKSATSAVVSSPGCLNPAAFYTMSKQAEAADLLYKANMNGGSVLEYTLAFTSASLDKYCSKWSAPPKTGFVDITTSKDFYRIYGGLQIGYLEEITAPQSAQHEVLGDSIAWGGCTIIYLLGQQLHFELFDFSYQVLNVSEVETVSASHTHRNPQIHQGWEGLLEGMKKARRLNNHVFSMLKARCPLEDKTACAIKQSGAPLPRVRFENTVSAFETLPQKGTVG

SEQ ID NO: 32521 - protein, 1237 aa, Arabidopsis thaliana
  misc_feature (1)..(1237): Ceres Seq. ID no. 13593290
MVSAERAATDSPIEYSDVAAYRLSLSEDTKALNQLNTLIQEGKEMASILYTYRSCVKALPQLPESMKHSQADLYLETYQVLDLEMSRLREIQRWQSSASAKLAADMQRFSRPERRINGPTVTHLWSMLKLLDVLVQLDHLKNAKASIPNDFSWYKRTFTQVSAQWQDTDTMREELDDLQIFLSTRWAILLNLHVEMFRVNKYACCSSPLCHLTILQAFGFLSKFSVEDILQVLIVFIVESLELDFALLFPERYILLRVLPVLVVLATPSEKDTEALYKRVKLNRLINIFKNDPVIPAFPDLHLSPAAILKELSRHYLIVNHIGALRAEHDDFTIRFASSMNQLLLLKSNDGAYTEWCREVKGNMYDMVVEGFQLLSRWTARIWEQCAWKFSRPCRDAGETPEASGSYSDYEKVVRFNYTAEERKALVELVGYIKSVGSMLQRCDTLVADALWETIHAEVQDFVQNTLATMLRTTFRKKKDLSRILSDMRTLSADWMANTRPEHEMPSSQHGNDESRGNFFYPRPVAPTAAQVHCLQFLIYEVVSGGNLRRPGGFFGNNGSEIPLCKLTPQLQFTMAAASIGILTDLGFLWFREFYLESSRVIQFPIECSLPWMLIDYILEAQNSGLLESVLLPFDIYNDSAQQALVVLRQRFLYDEIEAEVDHGFDIFVSRLSESIFTYYKSWSASELLDPSFLFALDNGEKFSIQPVRFTALFKMTKVKILGRTINLRSLIAQRMNRIFRENLEFLFDRFESQDLCAVVELEKLIDILKHSHELLSQDLSIDPFSLMLNEMQENISLVSFSSRLATQIWSEMQSDFLPNFILCNTTQRFVRSSKVPPTQKPSVPSAKPSFYCGTQDLNAAHQSFARLHSGFFGIPHLFSIVKLLGSRSLPWLIRALLDHISNKITTLEPMISGLQEALPKSIGLLSFDGGVTGCMKLIREQLNWGTKSELKSEVLRGIKEIGSVIYTMGLLDIVLREVDTKRFMQTAPWLGLIPGAEGQIVNAQDGESPLVNLLKSATSAVVSSPGCLNPAAFYTMSKQAEAADLLYKANMNGGSVLEYTLAFTSASLDKYCSKWSAPPKTGFVDITTSKDFYRIYGGLQIGYLEEITAPQSAQHEVLGDSIAWGGCTIIYLLGQQLHFELFDFSYQVLNVSEVETVSASHTHRNPQIHQGWEGLLEGMKKARRLNNHVFSMLKARCPLEDKTACAIKQSGAPLPRVRFENTVSAFETLPQKGTVG

SEQ ID NO: 32522 - protein, 1193 aa, Arabidopsis thaliana
  misc_feature (1)..(1193): Ceres Seq. ID no. 13593291
MASILYTYRSCVKALPQLPESMKHSQADLYLETYQVLDLEMSRLREIQRWQSSASAKLAADMQRFSRPERRINGPTVTHLWSMLKLLDVLVQLDHLKNAKASIPNDFSWYKRTFTQVSAQWQDTDTMREELDDLQIFLSTRWAILLNLHVEMFRVNKYACCSSPLCHLTILQAFGFLSKFSVEDILQVLIVFIVESLELDFALLFPERYILLRVLPVLVVLATPSEKDTEALYKRVKLNRLINIFKNDPVIPAFPDLHLSPAAILKELSRHYLIVNHIGALRAEHDDFTIRFASSMNQLLLLKSNDGAYTEWCREVKGNMYDMVVEGFQLLSRWTARIWEQCAWKFSRPCRDAGETPEASGSYSDYEKVVRFNYTAEERKALVELVGYIKSVGSMLQRCDTLVADALWETIHAEVQDFVQNTLATMLRTTFRKKKDLSRILSDMRTLSADWMANTRPEHEMPSSQHGNDESRGNFFYPRPVAPTAAQVHCLQFLIYEVVSGGNLRRPGGFFGNNGSEIPLCKLTPQLQFTMAAASIGILTDLGFLWFREFYLESSRVIQFPIECSLPWMLIDYILEAQNSGLLESVLLPFDIYNDSAQQALVVLRQRFLYDEIEAEVDHGFDIFVSRLSESIFTYYKSWSASELLDPSFLFALDNGEKFSIQPVRFTALFKMTKVKILGRTINLRSLIAQRMNRIFRENLEFLFDRFESQDLCAVVELEKLIDILKHSHELLSQDLSIDPFSLMLNEMQENISLVSFSSRLATQIWSEMQSDFLPNFILCNTTQRFVRSSKVPPTQKPSVPSAKPSFYCGTQDLNAAHQSFARLHSGFFGIPHLFSIVKLLGSRSLPWLIRALLDHISNKITTLEPMISGLQEALPKSIGLLSFDGGVTGCMKLIREQLNWGTKSELKSEVLRGIKEIGSVIYTMGLLDIVLREVDTKRFMQTAPWLGLIPGAEGQIVNAQDGESPLVNLLKSATSAVVSSPGCLNPAAFYTMSKQAEAADLLYKANMNGGSVLEYTLAFTSASLDKYCSKWSAPPKTGFVDITTSKDFYRIYGGLQIGYLEEITAPQSAQHEVLGDSIAWGGCTIIYLLGQQLHFELFDFSYQVLNVSEVETVSASHTHRNPQIHQGWEGLLEGMKKARRLNNHVFSMLKARCPLEDKTACAIKQSGAPLPRVRFENTVSAFETLPQKGTVG

SEQ ID NO: 32523 - DNA, 1686 bp, Arabidopsis thaliana
  misc_feature (1)..(1686): Ceres Seq. ID no. 13593302
aacactcaaaagtagtaacaactaagaatggaagatatcatcatcggcgtggtggctctcgccgcggttctccttttcttcctctaccaaaaaccgaaaaccaaacggtacaagctacctccagggccatcaccacttccggtgatcggaaacctccttcagcttcagaagcttaacccacaacgcttcttcgctggatgggccaaaaaatacggtccaatcttgtcatacaggataggaagcagaacaatggtggtgatatcttcagctgagctagctaaagagcttctcaagacgcaagatgtcaactttgcggaccggcctccacatcgtggccatgagttcatatcctacggcaggcgtgacatggcattaaaccactacacaccgtattaccgagagataaggaagatggggatgaaccacttgttctcaccaacacgtgtggccacctttaagcatgtacgagaggaagaggctaggaggatgatggataagatcaacaaggccgcggataaatccgaagtagtcgatataagtgagcttatgttgaccttcacgaactcggttgtgtgtagacaagcgttcgggaagaagtacaatgaagatggagaagagatgaagaggttcatcaagattctttatgggactcaaagcgttttggggaagatctttttctctgattttttcccatattgtggctttcttgatgatttatcaggcctcacagcttatatgaaagagtgtttcgaaagacaagacacttatattcaagaggttgtcaatgagacgcttgatcctaagagagtcaagcccgaaaccgagagcatgattgatctcttgatggggatctacaaagaacaacctttcgcttctgagtttactgtagataatgtcaaagccgtcatcttggatattgtagtggcgggaacagatactgcagctgcggcggttgtgtgggggatgacgtatctaatgaagtacccacaagtgttgaagaaagctcaagcagaagtgagagagtatatgaaagagaaaggttcaacgttcgttactgaagacgatgtcaagaaccttccttacttcagagccttagttaaagaaaccctaaggatcgaaccagtgattcctctccttatccctcgtgcttgcattcaagataccaagatcgccggttacgacatccccgcaggaacaacggtcaacgtcaacgcgtgggccgtgtcacgtgacgagaaagaatggggaccgaaccctgatgagtttaggcccgagaggtttcttgagaaggaagttgacttcaaaggcacggactacgagtttataccgttcgggtcaggccggagaatgtgcccgggaatgcgtcttggggccgcgatgcttgaggttccttatgcgaaccttctcctcagcttcaactttaaacttcctaatgggatgaaaccagatgatatcaatatggatgtcatgactggtcttgctatgcacaagtcgcagcatctcaagcttgttccagagaaagtgaacaagtattagctaatatatatcaaataaatctaccttctctgattatatagtatatgttcctccagtgtattctgtttcaatgtttggtttctttcttaaatggcaatcgtctctctatctttctcttcacattttgatatgaaggaagcaaattcacat

SEQ ID NO: 32524 - protein, 502 aa, Arabidopsis thaliana
  misc_feature (1)..(502): Ceres Seq. ID no. 13593303
MEDIIIGVVALAAVLLFFLYQKPKTKRYKLPPGPSPLPVIGNLLQLQKLNPQRFFAGWAKKYGPILSYRIGSRTMVVISSAELAKELLKTQDVNFADRPPHRGHEFISYGRRDMALNHYTPYYREIRKMGMNHLFSPTRVATFKHVREEEARRMMDKINKAADKSEVVDISELMLTFTNSVVCRQAFGKKYNEDGEEMKRFIKILYGTQSVLGKIFFSDFFPYCGFLDDLSGLTAYMKECFERQDTYIQEVVNETLDPKRVKPETESMIDLLMGIYKEQPFASEFTVDNVKAVILDIVVAGTDTAAAAVVWGMTYLMKYPQVLKKAQAEVREYMKEKGSTFVTEDDVKNLPYFRALVKETLRIEPVIPLLIPRACIQDTKIAGYDIPAGTTVNVNAWAVSRDEKEWGPNPDEFRPERFLEKEVDFKGTDYEFIPFGSGRRMCPGMRLGAAMLEVPYANLLLSFNFKLPNGMKPDDINMDVMTGLAMHKSQHLKLVPEKVNKY

SEQ ID NO: 32525 - protein, 428 aa, Arabidopsis thaliana
  misc_feature (1)..(428): Ceres Seq. ID no. 13593304
MVVISSAELAKELLKTQDVNFADRPPHRGHEFISYGRRDMALNHYTPYYREIRKMGMNHLFSPTRVATFKHVREEEARRMMDKINKAADKSEVVDISELMLTFTNSVVCRQAFGKKYNEDGEEMKRFIKILYGTQSVLGKIFFSDFFPYCGFLDDLSGLTAYMKECFERQDTYIQEVVNETLDPKRVKPETESMIDLLMGIYKEQPFASEFTVDNVKAVILDIVVAGTDTAAAAVVWGMTYLMKYPQVLKKAQAEVREYMKEKGSTFVTEDDVKNLPYFRALVKETLRIEPVIPLLIPRACIQDTKIAGYDIPAGTTVNVNAWAVSRDEKEWGPNPDEFRPERFLEKEVDFKGTDYEFIPFGSGRRMCPGMRLGAAMLEVPYANLLLSFNFKLPNGMKPDDINMDVMTGLAMHKSQHLKLVPEKVNKY

SEQ ID NO: 32526 - protein, 389 aa, Arabidopsis thaliana
  misc_feature (1)..(389): Ceres Seq. ID no. 13593305
MALNHYTPYYREIRKMGMNHLFSPTRVATFKHVREEEARRMMDKINKAADKSEVVDISELMLTFTNSVVCRQAFGKKYNEDGEEMKRFIKILYGTQSVLGKIFFSDFFPYCGFLDDLSGLTAYMKECFERQDTYIQEVVNETLDPKRVKPETESMIDLLMGIYKEQPFASEFTVDNVKAVILDIVVAGTDTAAAAVVWGMTYLMKYPQVLKKAQAEVREYMKEKGSTFVTEDDVKNLPYFRALVKETLRIEPVIPLLIPRACIQDTKIAGYDIPAGTTVNVNAWAVSRDEKEWGPNPDEFRPERFLEKEVDFKGTDYEFIPFGSGRRMCPGMRLGAAMLEVPYANLLLSFNFKLPNGMKPDDINMDVMTGLAMHKSQHLKLVPEKVNKY

SEQ ID NO: 32527 - DNA, 1251 bp, Arabidopsis thaliana
  misc_feature (1)..(1251): Ceres Seq. ID no. 13593313
ataatgaattaaagaatcacatttcatacaacctttctatcattttccaataatggcccggacagtaagtctctggcggagagaggccgtgttcttgacggccatgctggcgacagaaaccggcgtagtcggaataagtactttgtttaaagtagcaacttcaaagggactcaatctttacgctttcctcggctattcttatcttcttgcttctctccttcttcttccttctctgttcttcaccgacaggtcaagatcacttcctccactaagtttgtcaatactttctaaaataggacttcttggattgctaggatcaatgtatgtgatcacaggatacataggcatcgaatacagcagcccaaccttagcctctgccattagcaatatcactcctgctcttaccttcatcctcgccattatcttcagaatggaaaaagtatctttcaaagaaaggagcagtgtagccaaagtgatggggacgatattgtcgttaataggcgcacttgttgtggttctctaccatggtccacgtgtctttgttgcatcttctccgccgtatataaacttccgtcagctttctccgccgttatcatcttcaaattcagattggctcatcggcggagctcttcttaccataagagacatctttgtttctgtttctttcattctccaggcaaaaataatgagtacatatccagcagcattcacagtctccttcctctacattgtatcggtttcaatcgtgacttcaatgattggactagtagtggaaaagaacaatccaagcgtttggatcattcgatttgatattactttgataacaattgtaactatggcaataattacttcagtatactatgtgatccattcatggacagtacgtcacaaaggacctctatacttagcgatatttaagcctttgtcgattttaatagcggtggttatgagcgcagtttttctcaacgattctctctatctcggatgtttgataggaggactattgataacgttggggttttacgctgtgatgtggggtaaagcaaacgaagagaaagatcaattgttgttagtttcaggaaaagagagaacccctcttctattgaacggctaanntggccaaattagaattaaaaataaattagaactaatttacatattcttagccacacttttgggtaatgtgtacatgtatattactactctatttcatgttgcgctttgtttataacttgaataattgttttaacc

SEQ ID NO: 32528 - protein, 353 aa, Arabidopsis thaliana
  misc_feature (1)..(353): Ceres Seq. ID no. 15221208
MARTVSLWRREAVFLTAMLATETGVVGISTLFKVATSKGLNLYAFLGYSYLLASLLLLPSLFFTDRSRSLPPLSLSILSKIGLLGLLGSMYVITGYIGIEYSSPTLASAISNITPALTFILAIIFRMEKVSFKERSSVAKVMGTILSLIGALVVVLYHGPRVFVASSPPYINFRQLSPPLSSSNSDWLIGGALLTIRDIFVSVSFILQAKIMSTYPAAFTVSFLYIVSVSIVTSMIGLVVEKNNPSVWIIRFDITLITIVTMAIITSVYYVIHSWTVRHKGPLYLAIFKPLSILIAVVMSAVFLNDSLYLGCLIGGLLITLGFYAVMWGKANEEKDQLLLVSGKERTPLLLNG

SEQ ID NO: 32529 - protein, 336 aa, Arabidopsis thaliana
  misc_feature (1)..(336): Ceres Seq. ID no. 15221209
MLATETGVVGISTLFKVATSKGLNLYAFLGYSYLLASLLLLPSLFFTDRSRSLPPLSLSILSKIGLLGLLGSMYVITGYIGIEYSSPTLASAISNITPALTFILAIIFRMEKVSFKERSSVAKVMGTILSLIGALVVVLYHGPRVFVASSPPYINFRQLSPPLSSSNSDWLIGGALLTIRDIFVSVSFILQAKIMSTYPAAFTVSFLYIVSVSIVTSMIGLVVEKNNPSVWIIRFDITLITIVTMAIITSVYYVIHSWTVRHKGPLYLAIFKPLSILIAVVMSAVFLNDSLYLGCLIGGLLITLGFYAVMWGKANEEKDQLLLVSGKERTPLLLNG

SEQ ID NO: 32530 - protein, 264 aa, Arabidopsis thaliana
  misc_feature (1)..(264): Ceres Seq. ID no. 15221210
MYVITGYIGIEYSSPTLASAISNITPALTFILAIIFRMEKVSFKERSSVAKVMGTILSLIGALVVVLYHGPRVFVASSPPYINFRQLSPPLSSSNSDWLIGGALLTIRDIFVSVSFILQAKIMSTYPAAFTVSFLYIVSVSIVTSMIGLVVEKNNPSVWIIRFDITLITIVTMAIITSVYYVIHSWTVRHKGPLYLAIFKPLSILIAVVMSAVFLNDSLYLGCLIGGLLITLGFYAVMWGKANEEKDQLLLVSGKERTPLLLNG

SEQ ID NO: 32531 - DNA, 613 bp, Arabidopsis thaliana
  misc_feature (1)..(613): Ceres Seq. ID no. 13593322
ataatcagtgacttagagatcgaagacgatgatgagctctgcatccgccatgaaagctgttggatttttgcttctgcttaccattctaacattagcttatgcgaagaagtcaggtgatgtgacagagttgcagattggtgttaagtacaagcctcagaaatgtgatctccaggctcacaaaggggataagatcaaggttcactatcggggaaagttaactgatggaactgtctttgattcaagttttgagagaggtgaccctattgagtttgagcttggaactggtcaagtcatcccagaatgggaccagggtttattgggagcttgtgtaggtgagaagagaaagttgaaaatcccatccaagcttggttatggtgataacggctcaccaccaaaaatcccgggtggggcgacactgatattcgacaccgagcttgttgctgtgaacggagaaccatccagcgaagcgaaatcaaagaatgagctttgattacaccataattgtttttcatttaaaaggaaaccttgagtagtcatcgatgttggcatttgaatcttaaacagcctagaatcatttactttgctagttgaagacaataattatattttggtc

SEQ ID NO: 32532 - protein, 153 aa, Arabidopsis thaliana
  misc_feature (1)..(153): Ceres Seq. ID no. 13593323
MMSSASAMKAVGFLLLLTILTLAYAKKSGDVTELQIGVKYKPQKCDLQAHKGDKIKVHYRGKLTDGTVFDSSFERGDPIEFELGTGQVIPEWDQGLLGACVGEKRKLKIPSKLGYGDNGSPPKIPGGATLIFDTELVAVNGEPSSEAKSKNEL

SEQ ID NO: 32533 - protein, 152 aa, Arabidopsis thaliana
  misc_feature (1)..(152): Ceres Seq. ID no. 13593324
MSSASAMKAVGFLLLLTILTLAYAKKSGDVTELQIGVKYKPQKCDLQAHKGDKIKVHYRGKLTDGTVFDSSFERGDPIEFELGTGQVIPEWDQGLLGACVGEKRKLKIPSKLGYGDNGSPPKIPGGATLIFDTELVAVNGEPSSEAKSKNEL

SEQ ID NO: 32534 - protein, 146 aa, Arabidopsis thaliana
  misc_feature (1)..(146): Ceres Seq. ID no. 13593325
MKAVGFLLLLTILTLAYAKKSGDVTELQIGVKYKPQKCDLQAHKGDKIKVHYRGKLTDGTVFDSSFERGDPIEFELGTGQVIPEWDQGLLGACVGEKRKLKIPSKLGYGDNGSPPKIPGGATLIFDTELVAVNGEPSSEAKSKNEL

SEQ ID NO: 32535 - DNA, 1434 bp, Arabidopsis thaliana
  misc_feature (1)..(1434): Ceres Seq. ID no. 13593341
actctctcttcttgtgttttttttttcttatcttctttctcataaaaagtctctctcctctctcttccttgcgtcttctctttccccaatctctctcaggtttctctttcctctctcaccagaagggcaaaaaaattcccttaaagagtcccccgtttttgtttaaccccctcttctctcatatctttgaaatggatgacgatgggtttcgtaattggggttactatgaaccagctgctgctacctttaaaggtaatctcggtttgcagctaatgtctaccattgatcggaacactaaaccgtttttacctgggcgggatccgaatctaatgatggggcctaacgggtcatatcaccaccaagagcctcctatccacatgagctacaattggattaaccaacagaaggataagttcttcaatatgttgcctgttacaacagccactcctaactacggtaatgtccttcccgaaacttcgtctgctccgtcgatgcagatgaatctccatcatcatcttcaaaccgaggagaatccggttaagttggaagaagagattgttgttcagactaagaagagaaagaccaatgcaaaagctggctcgactccaaaggctaagaagccaaggaaaccaaaggatgagaacagtaacaacaacaacaacaacaacacgaatgttactcgagttaaacccgctaagaaaagtgttgacttggtgatcaatggagtgagtatggacatttcgggtcttcctgttcctatctgcacttgcactggagctcctcagcaatgctaccgttggggatgtggcggttggcagtctgcttgttgtaccacaaacatctcaatgcatccattaccaatgagtactaaacgccgtggagcgaggatctcgggaaggaagatgagtcaaggcgcgtttaagaaggttcttgagaaacttgcttctgatgggtttaactttgggaatccgattgatcttaagagccattgggcaagacatggaactaacaagttcgtcacaatcagatgattagttgcttgattagtaaaacagaacaagtgagtgtttctcttccgggatggaatctctcaatgatggtgtatgtatatacaacaaatctgaaatctgtgaccttttcaaaaattctgtctgcaatctgagttcgattctgttttcaggtaaaccatcttcgttgtagggtttggaagcagagttctctgttttctttaccacttttttttatcacacttttgctttgttttttgtttgtttgtctatctgtgtgtctgaggaagaagaaggtgtctgagaaaaaatctgcagggaaatttatttttttgtacttttttttttcttccttttgttatctttttataaacattttactgacttgtaacagatattcttttaattaaatgtttttatttttcag

SEQ ID NO: 32536 - protein, 342 aa, Arabidopsis thaliana
  misc_feature (1)..(342): Ceres Seq. ID no. 15221212
SLFLCFFFLIFFLIKSLSPLSSLRLLFPQSLSGFSFLSHQKGKKIPLKSPPFLFNPLFSHIFEMDDDGFRNWGYYEPAAATFKGNLGLQLMSTIDRNTKPFLPGRDPNLMMGPNGSYHHQEPPIHMSYNWINQQKDKFFNMLPVTTATPNYGNVLPETSSAPSMQMNLHHHLQTEENPVKLEEEIVVQTKKRKTNAKAGSTPKAKKPRKPKDENSNNNNNNNTNVTRVKPAKKSVDLVINGVSMDISGLPVPICTCTGAPQQCYRWGCGGWQSACCTTNISMHPLPMSTKRRGARISGRKMSQGAFKKVLEKLASDGFNFGNPIDLKSHWARHGTNKFVTIR

SEQ ID NO: 32537 - protein, 279 aa, Arabidopsis thaliana
  misc_feature (1)..(279): Ceres Seq. ID no. 15221213
MDDDGFRNWGYYEPAAATFKGNLGLQLMSTIDRNTKPFLPGRDPNLMMGPNGSYHHQEPPIHMSYNWINQQKDKFFNMLPVTTATPNYGNVLPETSSAPSMQMNLHHHLQTEENPVKLEEEIVVQTKKRKTNAKAGSTPKAKKPRKPKDENSNNNNNNNTNVTRVKPAKKSVDLVINGVSMDISGLPVPICTCTGAPQQCYRWGCGGWQSACCTTNISMHPLPMSTKRRGARISGRKMSQGAFKKVLEKLASDGFNFGNPIDLKSHWARHGTNKFVTIR

SEQ ID NO: 32538 - protein, 252 aa, Arabidopsis thaliana
  misc_feature (1)..(252): Ceres Seq. ID no. 15221214
MSTIDRNTKPFLPGRDPNLMMGPNGSYHHQEPPIHMSYNWINQQKDKFFNMLPVTTATPNYGNVLPETSSAPSMQMNLHHHLQTEENPVKLEEEIVVQTKKRKTNAKAGSTPKAKKPRKPKDENSNNNNNNNTNVTRVKPAKKSVDLVINGVSMDISGLPVPICTCTGAPQQCYRWGCGGWQSACCTTNISMHPLPMSTKRRGARISGRKMSQGAFKKVLEKLASDGFNFGNPIDLKSHWARHGTNKFVTIR

SEQ ID NO: 32539 - DNA, 1528 bp, Arabidopsis thaliana
  misc_feature (1)..(1528): Ceres Seq. ID no. 13593371
ttgaagacagagagagaaagtgagtgtgtctgtgagggcgaatcaatgtctctgctttctccagaagatgatatttactttttgtgtcaattagctgtataacgtcttcttcacataaaacaagaacactccacttactaaaaaaaataattatttcttcttgaagagtggaattctttctcgaatcttagaaaattccatttagaactaaagaagagagagagatccagtttctcgtcccagttaagctatggccatgttcaaaaccttatcttttttgttccttttgtgctttcagatacatggaacggtggctgcagatgaaaattccttgttttcattcaatggttttgtaaaatctccgagctttgacaagagggttgctctgtttggagattcgaagctggtcaatgacagttctttgattcagctgactgactcagtgactcgaagcgttggtcgagtcgtttacaagaaacccatcaatcttttcaaaggtaaacagaggaattcgagatctttctctactcacttctcgttttcttccatgtccaacgagattggtgatgatgtcttggcttttgtaatggttccatctagtttggatcttagtctgtttggtaagaaggacaacagttcctctgctttaggttttttatcacaatatgcaaagaacgagacagttgttgctgtcgagtttggtatctccaggacaggaaacagtgcaagaattttagttggtagacctgaatctgctgaaattagaaacctttcgtttgtgggtgacttgatgatggacaatggaaggactctgagctgtatgattgagtatgaggcaagttctaagagaatgatggttcgattcagaaaatctggttcggtaaagctgtttgatccgttcttctctttctcggtagacttggccaagttatggaaaggtggtgaagtcactgtgggtttaagctctgccaatgggaactcttcttccaaggcacattttctccattcatggagatttgaaataagacatcctcctccgatgtggatgcattcagtgccgcttgaaccgaatgaagtttcaaaggaggaggaaaatggtcgagggagaagtgagtgtacgcggaaaatgcttggtgctttgatctttggtgcagcttgtggagccttaggggcactgctgggtttgtatctctggacgatatgccgtgttaggcggtcaatggccgtggttccagaggaatgtgctattgaacaaggcaagaagtagtgagtagtttggttttggtgttgaaaagttgtcttgtgttgtggtgtaaatttaggaactttctcttcttcttcttccctcttgtttacttgatcgttctttagtgattcttatgtctgtttacttagttgcaggttttgtgaaatgacttttcacatgtaaaatctaaactgtgagaagatgtaagcttattgatatgttgcaaattaacttagttgttcatgttgttcttgatccatttggattatgagctgtgcattt

SEQ ID NO: 32540 - protein, 338 aa, Arabidopsis thaliana
  misc_feature (1)..(338): Ceres Seq. ID no. 13593372
MAMFKTLSFLFLLCFQIHGTVAADENSLFSFNGFVKSPSFDKRVALFGDSKLVNDSSLIQLTDSVTRSVGRVVYKKPINLFKGKQRNSRSFSTHFSFSSMSNEIGDDVLAFVMVPSSLDLSLFGKKDNSSSALGFLSQYAKNETVVAVEFGISRTGNSARILVGRPESAEIRNLSFVGDLMMDNGRTLSCMIEYEASSKRMMVRFRKSGSVKLFDPFFSFSVDLAKLWKGGEVTVGLSSANGNSSSKAHFLHSWRFEIRHPPPMWMHSVPLEPNEVSKEEENGRGRSECTRKMLGALIFGAACGALGALLGLYLWTICRVRRSMAVVPEECAIEQGKK

SEQ ID NO: 32541 - protein, 336 aa, Arabidopsis thaliana
  misc_feature (1)..(336): Ceres Seq. ID no. 13593373
MFKTLSFLFLLCFQIHGTVAADENSLFSFNGFVKSPSFDKRVALFGDSKLVNDSSLIQLTDSVTRSVGRVVYKKPINLFKGKQRNSRSFSTHFSFSSMSNEIGDDVLAFVMVPSSLDLSLFGKKDNSSSALGFLSQYAKNETVVAVEFGISRTGNSARILVGRPESAEIRNLSFVGDLMMDNGRTLSCMIEYEASSKRMMVRFRKSGSVKLFDPFFSFSVDLAKLWKGGEVTVGLSSANGNSSSKAHFLHSWRFEIRHPPPMWMHSVPLEPNEVSKEEENGRGRSECTRKMLGALIFGAACGALGALLGLYLWTICRVRRSMAVVPEECAIEQGKK

SEQ ID NO: 32542 - protein, 239 aa, Arabidopsis thaliana
  misc_feature (1)..(239): Ceres Seq. ID no. 13593374
MSNEIGDDVLAFVMVPSSLDLSLFGKKDNSSSALGFLSQYAKNETVVAVEFGISRTGNSARILVGRPESAEIRNLSFVGDLMMDNGRTLSCMIEYEASSKRMMVRFRKSGSVKLFDPFFSFSVDLAKLWKGGEVTVGLSSANGNSSSKAHFLHSWRFEIRHPPPMWMHSVPLEPNEVSKEEENGRGRSECTRKMLGALIFGAACGALGALLGLYLWTICRVRRSMAVVPEECAIEQGKK

SEQ ID NO: 32543 - DNA, 1755 bp, Arabidopsis thaliana
  misc_feature (1)..(1755): Ceres Seq. ID no. 13593392
atcccagtttttttttgtttttaatcactcaaccattaaaccccattttgatctctagttttttaaaagcaggagattttccttttcccagaaaagaaatttcccaaatcaaagtttcgagctttcacttctcgacttgcaaattctcgtcctttttactgaattcgatctgggtttttgtttttgattagtaaaataacaaaaaaaaaaaaaaggatttatcagaaatggctgcgagcgatgaagttaatcttattgagagcagaacagtggttcctctcaatacatgggttttaatatccaacttcaaagtagcctacaatatccttcgtcgccctgatggaacctttaaccgacacttagctgagtatctagaccgtaaagtcactgcaaacgccaatccggttgatggggttttctcgttcgatgtcttgattgatcgcaggatcaatcttctaagcagagtctatagaccagcttatgcagatcaagagcaacctcctagtattttagatctcgagaagcctgttgatggcgacattgtccctgttatattgttcttccatggaggtagctttgctcattcttctgcaaacagtgccatctacgatactctttgtcgcaggcttgttggtttgtgcaagtgtgttgttgtctctgtgaattatcggcgtgcaccagagaatccatacccttgtgcttatgatgatggttggattgctcttaattgggttaactcgagatcttggcttaaatccaagaaagactcaaaggtccatattttcttggctggtgatagctctggaggtaacatcgcgcataatgtggctttaagagcgggtgaatcgggaatcgatgttttggggaacattctgctgaatcctatgtttggtgggaatgagagaacggagtctgagaaaagtttggatgggaaatactttgtgacggttagagaccgcgattggtactggaaagcgtttttacccgagggagaagatagagagcatccagcgtgtaatccgtttagcccgagagggaaaagcttagaaggagtgagtttccccaagagtcttgtggttgtcgcgggtttggatttgattagagattggcagttggcatacgcggaagggctcaagaaagcgggtcaagaggttaagcttatgcatttagagaaagcaactgttgggttttacctcttgcctaataacaatcatttccataatgttatggatgagatttcggcgtttgtaaacgcggaatgttaacactgggttagagaaagaaggttgttttaacaaagccaagacatctttcaaactaacacacaggtgaatgtattgcctgtggattctctcgtttagttttgtttttgtgtttagtatctaagtgtgtggcggtctgcggcagcctttgtgatgactgtttaaacgctggattctgaaacgctaaagcttgtggaagaacagtgaggcgtttagagacttggaaaggaaccaagcactagtaaaaatttctcctttttttgtctgtaatatttggcatttagcttttacccttgagcctttttactaactaaaagctgattttttcagcatgagagtggtaattagatatctataaatatatatatttcaagaatgtaatgtttatacacaaattttagtgattttggtaaatgtatgtagggtctgcactctgcagttgtattgttgctcctctttttcattgtactctaatggattttacaaaaataag

SEQ ID NO: 32544 - protein, 345 aa, Arabidopsis thaliana
  misc_feature (1)..(345): Ceres Seq. ID no. 13593393
MAASDEVNLIESRTVVPLNTWVLISNFKVAYNILRRPDGTFNRHLAEYLDRKVTANANPVDGVFSFDVLIDRRINLLSRVYRPAYADQEQPPSILDLEKPVDGDIVPVILFFHGGSFAHSSANSAIYDTLCRRLVGLCKCVVVSVNYRRAPENPYPCAYDDGWIALNWVNSRSWLKSKKDSKVHIFLAGDSSGGNIAHNVALRAGESGIDVLGNILLNPMFGGNERTESEKSLDGKYFVTVRDRDWYWKAFLPEGEDREHPACNPFSPRGKSLEGVSFPKSLVVVAGLDLIRDWQLAYAEGLKKAGQEVKLMHLEKATVGFYLLPNNNHFHNVMDEISAFVNAEC

SEQ ID NO: 32545 - DNA, 1741 bp, Arabidopsis thaliana
  misc_feature (1)..(1741): Ceres Seq. ID no. 13593406
atgggaaagctcttggtgttaatgttagttgggatgttcttggcttttgaaagcttggaagctcttgaatatggagatgcacttaacaagtcaatcttgttctttgaaggccaacgatccggtaaactcccgactaaccaacgagttaaatggcgagccgattctgccctctctgatggttcacttgctaatgtgaatttaattggaggatattacgatgctggtgacaatgtaaaatttgtgtggccaatgtcatttaccacaaccttgttaagttgggctgcaattgaataccaaaatgagatttcttccgttaaccagctcggttatctccggtctactatcaaatggggaaccgatttcatcctacgcgctcatacatctcccaacatgctatatacccaggtgggagatggtaattcagatcatagttgttgggagaggccagaagatatggacacatcaagaactctctacagtatctcttcctcttcccctggttctgaagccgcgggtgaagccgcagccgctcttgcagcggcctcacttgttttcaaatcggtcgattctacttattcatccacactattaaaccatgcaaaaaccctatttgaatttgctgataagtacagaggttcttatcaagcatcttgccctttctactgctcctactccggctaccaggatgaattattatgggctgcggcttggctatataaagcaacaggagataaaatttacataaattatgttataagcaataaagattggagccaagccgttaatgaattcagttgggacaacaaattcgtcggcgctcaagctttactcgtatcggagttttacaacggggcaaatgacttggcaaaatttaagtccgatgttgaatccttcgtctgtgcaatgatgccaggaagtagctctcaacaaattaaaccaactcctggtggccttttgtttattagagacagtagcaacttacaatatgtaacaacggctacaactgttttgttccattactcaaaaactcttaccaaagccggggttggttcaatccagtgcggttcgaccaagttcaccgtatctcaaattcgaaattttgccaaatcacaggttgattatatccttggaaataatccaatgaaaatgtcttacatggtcggatttgggacaaagtatccaacacaacctcatcatagaggctcatctttaccatcgatccaatctaaaccggagaaaattgactgtaatggaggatattcatactacaattctgatacaccaaacccgaatgtgcatattggtgcaattgtgggcggaccgaattcatccgatcagtatagcgacaaaaaatcagattactctcatgctgagcccacaacttacatcaacgccgcctttattggacctgttgcagctctaatcagttcttccggataaactcacgtttagattggttgtggggaaacaaatattagcaaagaagaatcattactcatcaacaaactattatgactacaaacttaaataattagtcaggggatgtatcgtttgctttaaacatatatctctatatagatgtatatacctacacacatacacacactcacatatatatcattgaatcgtatatcttagctaaaatgaaaactatttaattacagatgtctatataggttttcttatatcattgtattgtatagattttttatgatacattatatatagttcattcttattt

SEQ ID NO: 32546 - protein, 479 aa, Arabidopsis thaliana
  misc_feature (1)..(479): Ceres Seq. ID no. 13593407
MGKLLVLMLVGMFLAFESLEALEYGDALNKSILFFEGQRSGKLPTNQRVKWRADSALSDGSLANVNLIGGYYDAGDNVKFVWPMSFTTTLLSWAAIEYQNEISSVNQLGYLRSTIKWGTDFILRAHTSPNMLYTQVGDGNSDHSCWERPEDMDTSRTLYSISSSSPGSEAAGEAAAALAAASLVFKSVDSTYSSTLLNHAKTLFEFADKYRGSYQASCPFYCSYSGYQDELLWAAAWLYKATGDKIYINYVISNKDWSQAVNEFSWDNKFVGAQALLVSEFYNGANDLAKFKSDVESFVCAMMPGSSSQQIKPTPGGLLFIRDSSNLQYVTTATTVLFHYSKTLTKAGVGSIQCGSTKFTVSQIRNFAKSQVDYILGNNPMKMSYMVGFGTKYPTQPHHRGSSLPSIQSKPEKIDCNGGYSYYNSDTPNPNVHIGAIVGGPNSSDQYSDKKSDYSHAEPTTYINAAFIGPVAALISSSG

SEQ ID NO: 32547 - protein, 472 aa, Arabidopsis thaliana
  misc_feature (1)..(472): Ceres Seq. ID no. 13593408
MLVGMFLAFESLEALEYGDALNKSILFFEGQRSGKLPTNQRVKWRADSALSDGSLANVNLIGGYYDAGDNVKFVWPMSFTTTLLSWAAIEYQNEISSVNQLGYLRSTIKWGTDFILRAHTSPNMLYTQVGDGNSDHSCWERPEDMDTSRTLYSISSSSPGSEAAGEAAAALAAASLVFKSVDSTYSSTLLNHAKTLFEFADKYRGSYQASCPFYCSYSGYQDELLWAAAWLYKATGDKIYINYVISNKDWSQAVNEFSWDNKFVGAQALLVSEFYNGANDLAKFKSDVESFVCAMMPGSSSQQIKPTPGGLLFIRDSSNLQYVTTATTVLFHYSKTLTKAGVGSIQCGSTKFTVSQIRNFAKSQVDYILGNNPMKMSYMVGFGTKYPTQPHHRGSSLPSIQSKPEKIDCNGGYSYYNSDTPNPNVHIGAIVGGPNSSDQYSDKKSDYSHAEPTTYINAAFIGPVAALISSSG

SEQ ID NO: 32548 - protein, 468 aa, Arabidopsis thaliana
  misc_feature (1)..(468): Ceres Seq. ID no. 13593409
MFLAFESLEALEYGDALNKSILFFEGQRSGKLPTNQRVKWRADSALSDGSLANVNLIGGYYDAGDNVKFVWPMSFTTTLLSWAAIEYQNEISSVNQLGYLRSTIKWGTDFILRAHTSPNMLYTQVGDGNSDHSCWERPEDMDTSRTLYSISSSSPGSEAAGEAAAALAAASLVFKSVDSTYSSTLLNHAKTLFEFADKYRGSYQASCPFYCSYSGYQDELLWAAAWLYKATGDKIYINYVISNKDWSQAVNEFSWDNKFVGAQALLVSEFYNGANDLAKFKSDVESFVCAMMPGSSSQQIKPTPGGLLFIRDSSNLQYVTTATTVLFHYSKTLTKAGVGSIQCGSTKFTVSQIRNFAKSQVDYILGNNPMKMSYMVGFGTKYPTQPHHRGSSLPSIQSKPEKIDCNGGYSYYNSDTPNPNVHIGAIVGGPNSSDQYSDKKSDYSHAEPTTYINAAFIGPVAALISSSG

SEQ ID NO: 32549 - DNA, 1461 bp, Arabidopsis thaliana
  misc_feature (1)..(1461): Ceres Seq. ID no. 13593429
atcttaaaagaaaccgaaagctaatctccaaagggaaaaagacgtgtagcagagacctatacatacacctatacattcacgttgcgtgtgataatctactgagggttctatctatattaatccttctctgcttccttcaatctaattgcaaatcaaatggatcgtcttaagctttatttctccgttttcgttttgtctttctttatcgtctcggtttcgtcgtctgatgtcaacgacggcgatgatctcgtgatccgtcaggtggttggtggagccgagcctcaggttttgacctcagaggatcacttttctctcttcaagcggaagttcgggaaggtctacgcttccaacgaggagcatgactatagattctcggttttcaaagcgaatctcaggcgagcgaggcgtcaccagaagttggatccgtcggcgactcatggtgttacgcagttctcagatctgactcggtctgagttccgtaagaagcacttgggggttagaagtggctttaagcttcctaaagatgccaacaaggctccgattctccctaccgaaaatctccctgaggattttgattggagagatcatggcgccgttactcccgtcaaaaatcagggatcttgcggctcttgctggagtttcagcgccactggagctttggaaggtgctaacttcctcgctaccggcaaactcgtcagcctcagcgaacaacagctcgtcgactgtgatcacgagtgtgatcccgaggaggcagattcctgcgactctggttgcaatggtgggctaatgaacagcgcttttgaatacaccctcaaaaccggagggctcatgaaagaagaagactatccttacaccggaaaggacggcaagacctgcaagctagacaagtccaagatcgttgcctctgtctccaacttcagtgttatctccattgatgaagaacagattgctgcaaaccttgtcaagaacggacctcttgctgtagccatcaacgctggctatatgcagacttacattggaggagtctcatgcccttacatatgcaccaggaggctcaaccacggtgtcttattggttggctatggagcggcaggttacgctccggctaggttcaaggagaagccttactggatcatcaagaactcgtggggagagacttggggtgaaaatggtttctacaaaatctgcaaaggccgtaacatttgtggtgttgacagtatggtctccactgttgcagccaccgtctcaaccaccgcccattaagcatctcgtcaataagttttaattactttggtgatttgtatgagcgagctctctttgcgctgctgactctctctatttatctctgcttcttgcttgtaaataaaatgcgttctattgagcaaaaccgtacaatgctcattagcaatgagcccactttaacaagtatcagtttatggcccaatatatgaaagttaaatc

SEQ ID NO: 32550 - protein, 368 aa, Arabidopsis thaliana
  misc_feature (1)..(368): Ceres Seq. ID no. 13593430
MDRLKLYFSVFVLSFFIVSVSSSDVNDGDDLVIRQVVGGAEPQVLTSEDHFSLFKRKFGKVYASNEEHDYRFSVFKANLRRARRHQKLDPSATHGVTQFSDLTRSEFRKKHLGVRSGFKLPKDANKAPILPTENLPEDFDWRDHGAVTPVKNQGSCGSCWSFSATGALEGANFLATGKLVSLSEQQLVDCDHECDPEEADSCDSGCNGGLMNSAFEYTLKTGGLMKEEDYPYTGKDGKTCKLDKSKIVASVSNFSVISIDEEQIAANLVKNGPLAVAINAGYMQTYIGGVSCPYICTRRLNHGVLLVGYGAAGYAPARFKEKPYWIIKNSWGETWGENGFYKICKGRNICGVDSMVSTVAATVSTTAH

SEQ ID NO: 32551 - DNA, 1211 bp, Arabidopsis thaliana
  misc_feature (1)..(1211): Ceres Seq. ID no. 13593431
atttcctcattcgcatcaacgaagtcaaaaccatttataaacccaaaatcttcttcgatctctccataattctcgtttgcgtcattcattcatcacatatcaaccaccacagagacagaggaatagtctcaaaactttctcagaaatggcaggcagtaatattctccataagattaagttgaaggctgggttctgtggatctgctcctgacatgggaagaggcaaaagcaagatgtggaagaacatcacccacggttttcactgtgtgaagggcaagtccagccatccgatggaggactatgtagtgtctgaattcaagaaacttgaaggtcatgaattgggtttgtttgctatctttgatggtcacttggggcatgatgtggctaaatacttgcagactaatctctttgacaacattcttaaagagaaggatttttggactgacacagagaatgctataaggaatgcctacagatcaacagatgccgtgatattgcagcagtcccttaagcttggtaaaggcggatcaacagctgtaacgggaattctaattgatggtaaaaagctagttgttgctaatgttggagactccagagcagtgatgtctaagaatggtgttgcgcatcagctatctgtcgatcatgaaccaagcaaggagaaaaaagaaatagagagccgaggtggctttgtgtcaaatattccaggggatgttccacgagtggatggacagttagcggttgcaagagcatttggagataagagcttaaagttacatctgagctcagaaccggacataacacaccagacaattgatgatcacactgaattcatccttttcgcaagcgatggtatttggaaagtattatcaaaccaagaagcggttgatgctatcaagagtatcaaagatcctcatgcagctgcaaagcacttgatagaggaagctatatctaggaagagcaaagatgacatctcatgtatcgttgtaaagttccactaatcttctcttcttcttatcaaaagctattttgtctataagttaccatcaagttgcaagatagagaaatatatgctcaagctgtgtctgtaaaaacccagtaatgaggtttcccagaagatgtaatatattatcgaaatcgcaacagccttaagatacaaaagaaagaactgaaattaaaaaaatgaaataaaacaaatcgcaacagccttaagat

SEQ ID NO: 32552 - protein, 283 aa, Arabidopsis thaliana
  misc_feature (1)..(283): Ceres Seq. ID no. 13593432
MAGSNILHKIKLKAGFCGSAPDMGRGKSKMWKNITHGFHCVKGKSSHPMEDYVVSEFKKLEGHELGLFAIFDGHLGHDVAKYLQTNLFDNILKEKDFWTDTENAIRNAYRSTDAVILQQSLKLGKGGSTAVTGILIDGKKLVVANVGDSRAVMSKNGVAHQLSVDHEPSKEKKEIESRGGFVSNIPGDVPRVDGQLAVARAFGDKSLKLHLSSEPDITHQTIDDHTEFILFASDGIWKVLSNQEAVDAIKSIKDPHAAAKHLIEEAISRKSKDDISCIVVKFH

SEQ ID NO: 32553 - protein, 261 aa, Arabidopsis thaliana
  misc_feature (1)..(261): Ceres Seq. ID no. 13593433
MGRGKSKMWKNITHGFHCVKGKSSHPMEDYVVSEFKKLEGHELGLFAIFDGHLGHDVAKYLQTNLFDNILKEKDFWTDTENAIRNAYRSTDAVILQQSLKLGKGGSTAVTGILIDGKKLVVANVGDSRAVMSKNGVAHQLSVDHEPSKEKKEIESRGGFVSNIPGDVPRVDGQLAVARAFGDKSLKLHLSSEPDITHQTIDDHTEFILFASDGIWKVLSNQEAVDAIKSIKDPHAAAKHLIEEAISRKSKDDISCIVVKFH

SEQ ID NO: 32554 - protein, 254 aa, Arabidopsis thaliana
  misc_feature (1)..(254): Ceres Seq. ID no. 13593434
MWKNITHGFHCVKGKSSHPMEDYVVSEFKKLEGHELGLFAIFDGHLGHDVAKYLQTNLFDNILKEKDFWTDTENAIRNAYRSTDAVILQQSLKLGKGGSTAVTGILIDGKKLVVANVGDSRAVMSKNGVAHQLSVDHEPSKEKKEIESRGGFVSNIPGDVPRVDGQLAVARAFGDKSLKLHLSSEPDITHQTIDDHTEFILFASDGIWKVLSNQEAVDAIKSIKDPHAAAKHLIEEAISRKSKDDISCIVVKFH

SEQ ID NO: 32555 - DNA, 1538 bp, Arabidopsis thaliana
  misc_feature (1)..(1538): Ceres Seq. ID no. 13593435
gccggcaaattcttacgtttctccggcggttagaaaaatgacaccacagatcaaaactcatctcttgccgaagcaagaaccttcttcgtctgagaaccatggatcatcaacctccggcatcgttttcaacgtgtcaacgagtataatcggagccggaataatgtcgatgccggcggcgtttaaagttcttggaatagttccagcgtttttgattatcacgatcatagcttggctttccacaatttccgttggatttctgatgaaatcaactctcgccggagaatcaactacttacgccggagttatgaaagagtcgtttggtaaaacaggatccatcgctgtacagattgctacgatggttgctacttttggttgtatgattatattttcgattattataggagatgtgctttctggtaatgaaaatggtggtcctgaacatattggagttttgcaagaatggtttggttcttactggtggaacacgagaatcttcgctttgttatttgtctacggctttgtcttgcttccattggtcctgcgtagacgagtcgaaagactggcaattagttccgctgtatcgtttcttcttgcggttctatttgttgtcataagctcggtgctggcgatttccgcgctggtgaatggacaaacgaagaatccaagactgtttccggagttgagcaatggaggatcgttctggcaactcttcacagcttcccctgttatagttacagccttcacgtttcacttcaatgttcatccaattggattcgagctcaaagatccattacaagtgatcccagcaactaagatctctgtcatcttgtgtgctgctatctacttcgcaactggactctttggttaccttctctttggagatgcaactatgtcggatattctagtgaactttgaccagagctctggttcttccattggttctcttctcaacgacattgtcagactcagctacgtgcttcacctcatgctggtctttcctctcctgaacttctcattgagagcaaatctcgacgaactcttgtaccccaagaagccgtccttggaaaaagacacaaaaagattcatcggactcactctggctctactgatttgctgtttcttgtctgcaatcgctgtaccagacatttggtacttctttcagttcatgggatcaaccatcacagtctccatagcattcatatttccagccgccattgttctaaggaatatccatggtgtatcaacctcaagagagaagatcgtagctgcaataatgcttgttcttgctgttgccactagcattattgctatctcgacaaatttatacagcctcgcagcaaactagtcgttgaaaaaagttttgcaaacagtcccttccatgatcacttcaaagaaatctgtaaaattattagcttgccgtagcattcatatttatatctttgtgaaataggtttgtcagaaaatgcaatgtaatagctatacaaagtgcaatttttgttgctgcttgaaacagagaaagaggaaatgaacaactcttc

SEQ ID NO: 32556 - protein, 447 aa, Arabidopsis thaliana
  misc_feature (1)..(447): Ceres Seq. ID no. 13593436
PANSYVSPAVRKMTPQIKTHLLPKQEPSSSENHGSSTSGIVFNVSTSIIGAGIMSMPAAFKVLGIVPAFLIITIIAWLSTISVGFLMKSTLAGESTTYAGVMKESFGKTGSIAVQIATMVATFGCMIIFSIIIGDVLSGNENGGPEHIGVLQEWFGSYWWNTRIFALLFVYGFVLLPLVLRRRVERLAISSAVSFLLAVLFVVISSVLAISALVNGQTKNPRLFPELSNGGSFWQLFTASPVIVTAFTFHFNVHPIGFELKDPLQVIPATKISVILCAAIYFATGLFGYLLFGDATMSDILVNFDQSSGSSIGSLLNDIVRLSYVLHLMLVFPLLNFSLRANLDELLYPKKPSLEKDTKRFIGLTLALLICCFLSAIAVPDIWYFFQFMGSTITVSIAFIFPAAIVLRNIHGVSTSREKIVAAIMLVLAVATSIIAISTNLYSLAAN

SEQ ID NO: 32557 - protein, 435 aa, Arabidopsis thaliana
  misc_feature (1)..(435): Ceres Seq. ID no. 13593437
MTPQIKTHLLPKQEPSSSENHGSSTSGIVFNVSTSIIGAGIMSMPAAFKVLGIVPAFLIITIIAWLSTISVGFLMKSTLAGESTTYAGVMKESFGKTGSIAVQIATMVATFGCMIIFSIIIGDVLSGNENGGPEHIGVLQEWFGSYWWNTRIFALLFVYGFVLLPLVLRRRVERLAISSAVSFLLAVLFVVISSVLAISALVNGQTKNPRLFPELSNGGSFWQLFTASPVIVTAFTFHFNVHPIGFELKDPLQVIPATKISVILCAAIYFATGLFGYLLFGDATMSDILVNFDQSSGSSIGSLLNDIVRLSYVLHLMLVFPLLNFSLRANLDELLYPKKPSLEKDTKRFIGLTLALLICCFLSAIAVPDIWYFFQFMGSTITVSIAFIFPAAIVLRNIHGVSTSREKIVAAIMLVLAVATSIIAISTNLYSLAAN

SEQ ID NO: 32558 - protein, 394 aa, Arabidopsis thaliana
  misc_feature (1)..(394): Ceres Seq. ID no. 13593438
MSMPAAFKVLGIVPAFLIITIIAWLSTISVGFLMKSTLAGESTTYAGVMKESFGKTGSIAVQIATMVATFGCMIIFSIIIGDVLSGNENGGPEHIGVLQEWFGSYWWNTRIFALLFVYGFVLLPLVLRRRVERLAISSAVSFLLAVLFVVISSVLAISALVNGQTKNPRLFPELSNGGSFWQLFTASPVIVTAFTFHFNVHPIGFELKDPLQVIPATKISVILCAAIYFATGLFGYLLFGDATMSDILVNFDQSSGSSIGSLLNDIVRLSYVLHLMLVFPLLNFSLRANLDELLYPKKPSLEKDTKRFIGLTLALLICCFLSAIAVPDIWYFFQFMGSTITVSIAFIFPAAIVLRNIHGVSTSREKIVAAIMLVLAVATSIIAISTNLYSLAAN

SEQ ID NO: 32559 - DNA, 1580 bp, Arabidopsis thaliana
  misc_feature (1)..(1580): Ceres Seq. ID no. 13593495
aaaccagaccaaaaatatattctctcggttttttccagagcgtatattcaaattcttccttaaaaagtaaaaattaatctgattctctctactactactactacgatgggtgagaaaaaggaagaaacggcgacgaaacctcaaggagagaagaaacctaccgatggtggaatcaccaccgtcgttatgaagcttgatatgcattgtgaaggttgcggcaaaaaaatcaaacgcatcttcaaacatttcaaaggtgtggaagatgtgaagattgattataagagtaacaaattgacggtgatcggaaacgtagatccagtggaagttcgtgataaagtggccgacaaaattaagagaccagtcgaacttgtctctacagtagcgccgccgaagaaagagacacctccttcatcaggcggtgcagagaagaagccttctccggcagcggaggagaaaccggctgagaagaaaccagccgccgttgagaaacccggtgagaaaaaagaagagaagaagaaagaggaaggagagaagaaagcttctcctccaccaccacctaaagagagtactgtggttttgaagaccaagttacattgtgaaggttgcgaacacaaaatcaaaagaatagtcaacaaaattaaaggggttaattcggttgctattgatagtgccaaggatttggttatagttaaggggatcattgacgtgaaacaactcactccttatcttaacgagaagcttaaacgcacggtggaagttgttccggccaaaaaggatgacggagcaccagtggcagctgcagcggcggctccagctggcggtgagaagaaggacaaagttgctggtgaaaagaaagagattaaagatgttggagaaaagaaagtcgacggtggtggtgagaagaagaaagaagttgctgttggcggcggtggaggaggaggtggaggtggaggagacggtggtgctatggatgtgaagaaatcggagtataacggttacggttatcctccacagccgatgtattactacccagaaggacaagtatacggtcaacaacattacatgatgcaaggtcaatcatcgcaatcgtatgtacaagaaccgtattcgaaccaaggatacgtgcaagaatcgtatatgaaccaaggttacggtcaagggtatggacaagaagctccaccaccaccatatatgaaccaacaaggttacgcagatccttatggtcacatgcgtgcgcctgagttgtttagtgatgagaatccaaatgggtgttctgtgatgtgagtaaaacaaatggggaggaaaatgtaaataactaaaacaatatagggtgagaatgttagctatgacaaaaatggtatactacgaaagcacggaaacttccgagtccggtaatctaaaccggcaagattggccggttagaaccggtttttgagaggcgtggattggttggttggtttatttcttctatataggtactataattttgtatcgtaataatcttctgttttataactttttgtgctatgtaattgtcaggtgatcataatgaaaagaaaacatattagttctgattaatt

SEQ ID NO: 32560 - protein, 392 aa, Arabidopsis thaliana
  misc_feature (1)..(392): Ceres Seq. ID no. 13593496
MGEKKEETATKPQGEKKPTDGGITTVVMKLDMHCEGCGKKIKRIFKHFKGVEDVKIDYKSNKLTVIGNVDPVEVRDKVADKIKRPVELVSTVAPPKKETPPSSGGAEKKPSPAAEEKPAEKKPAAVEKPGEKKEEKKKEEGEKKASPPPPPKESTVVLKTKLHCEGCEHKIKRIVNKIKGVNSVAIDSAKDLVIVKGIIDVKQLTPYLNEKLKRTVEVVPAKKDDGAPVAAAAAAPAGGEKKDKVAGEKKEIKDVGEKKVDGGGEKKKEVAVGGGGGGGGGGGDGGAMDVKKSEYNGYGYPPQPMYYYPEGQVYGQQHYMMQGQSSQSYVQEPYSNQGYVQESYMNQGYGQGYGQEAPPPPYMNQQGYADPYGHMRAPELFSDENPNGCSVM

SEQ ID NO: 32561 - protein, 365 aa, Arabidopsis thaliana
  misc_feature (1)..(365): Ceres Seq. ID no. 13593497
MKLDMHCEGCGKKIKRIFKHFKGVEDVKIDYKSNKLTVIGNVDPVEVRDKVADKIKRPVELVSTVAPPKKETPPSSGGAEKKPSPAAEEKPAEKKPAAVEKPGEKKEEKKKEEGEKKASPPPPPKESTVVLKTKLHCEGCEHKIKRIVNKIKGVNSVAIDSAKDLVIVKGIIDVKQLTPYLNEKLKRTVEVVPAKKDDGAPVAAAAAAPAGGEKKDKVAGEKKEIKDVGEKKVDGGGEKKKEVAVGGGGGGGGGGGDGGAMDVKKSEYNGYGYPPQPMYYYPEGQVYGQQHYMMQGQSSQSYVQEPYSNQGYVQESYMNQGYGQGYGQEAPPPPYMNQQGYADPYGHMRAPELFSDENPNGCSVM

SEQ ID NO: 32562 - protein, 361 aa, Arabidopsis thaliana
  misc_feature (1)..(361): Ceres Seq. ID no. 13593498
MHCEGCGKKIKRIFKHFKGVEDVKIDYKSNKLTVIGNVDPVEVRDKVADKIKRPVELVSTVAPPKKETPPSSGGAEKKPSPAAEEKPAEKKPAAVEKPGEKKEEKKKEEGEKKASPPPPPKESTVVLKTKLHCEGCEHKIKRIVNKIKGVNSVAIDSAKDLVIVKGIIDVKQLTPYLNEKLKRTVEVVPAKKDDGAPVAAAAAAPAGGEKKDKVAGEKKEIKDVGEKKVDGGGEKKKEVAVGGGGGGGGGGGDGGAMDVKKSEYNGYGYPPQPMYYYPEGQVYGQQHYMMQGQSSQSYVQEPYSNQGYVQESYMNQGYGQGYGQEAPPPPYMNQQGYADPYGHMRAPELFSDENPNGCSVM

SEQ ID NO: 32563 - DNA, 1451 bp, Arabidopsis thaliana
  misc_feature (1)..(1451): Ceres Seq. ID no. 13593503
aagctaacaacattcacaaggagagagaaacaataaagggcaaggaaaaagatcaaacctttttctttctttctttctcctgctctctgcaatttagaagaagatcgaagaatttgtttgttgtttatcttcttctataaaaacaaaccgtggggtctgttttcatttctggccttgcgattccgataaaactctcagcttcccattcaatccaatccaattccacttctcaaacatatatataattctatatttttgagagacagtttactttttctccttctctctctctctctctttctctttctctgtctctttggcttttctcctcctgttctcatggaagcttcacccaatgatcgacttcattttggcaaaatgggtttcgggtgtaagcattacaagaggagatgccaaatcagagctccatgttgcaacgaagtcttcgattgtcgccattgtcacaacgagagcactagcacattgcgcaatatctacgaccgtcacgatcttgttcgtcaagacgttaaacaagtgatttgttctgtttgcgatacagagcagccggcagctcaagtttgttcgaattgtggtgtcaacatgggagaatatttttgcagcatctgcatattctatgatgatgatactgaaaaacaacagtttcattgcgatgactgtggaatttgcagagttggtgggcgtgagaatttcttccattgcaagaagtgtggatcttgttatgcggttggtctgcgcaacaaccatcgctgcgttgagaattcaatgcgtcatcactgtcccatttgttacgagtacctttttgactctctaaaggacacaaatgtgatgaaatgcgggcacacaatgcacgtagaatgctacaacgagatgatcaaacgtgacaagttttgttgtccaatttgctcgaggtcagtgattgatatgtctaaaacatggcagagactcgatgaagagatcgaagccactgctatgccttcagattaccgtgacaagaaggtttggatactttgcaacgattgtaacgacacaacagaagtgcacttccacataatcggacagaaatgtggacattgcagatcatacaacacacgagcgattgcgcctcctgttcttcctcaatgacaaaaccaagatcttcccatgtattgcctccagaaagcaagcaagaactttttgttgctaaaaaaactgaggcatagattgatgatcataacaaagaaagaaaaagaaaaagattgatgatcaatttgatcattggtcacaaaagcaaaacacacatttgtcttcttcatttgatttgttgttgttcttatactgttacatttttccatttgtgtttgggtgttggaaatgcgaggattatgtataatatactctatattcttgatccaggaaaagttacctggataatatgttttcagggatttttt

SEQ ID NO: 32564 - protein, 267 aa, Arabidopsis thaliana
  misc_feature (1)..(267): Ceres Seq. ID no. 13593504
MEASPNDRLHFGKMGFGCKHYKRRCQIRAPCCNEVFDCRHCHNESTSTLRNIYDRHDLVRQDVKQVICSVCDTEQPAAQVCSNCGVNMGEYFCSICIFYDDDTEKQQFHCDDCGICRVGGRENFFHCKKCGSCYAVGLRNNHRCVENSMRHHCPICYEYLFDSLKDTNVMKCGHTMHVECYNEMIKRDKFCCPICSRSVIDMSKTWQRLDEEIEATAMPSDYRDKKVWILCNDCNDTTEVHFHIIGQKCGHCRSYNTRAIAPPVLPQ

SEQ ID NO: 32565 - protein, 254 aa, Arabidopsis thaliana
  misc_feature (1)..(254): Ceres Seq. ID no. 13593505
MGFGCKHYKRRCQIRAPCCNEVFDCRHCHNESTSTLRNIYDRHDLVRQDVKQVICSVCDTEQPAAQVCSNCGVNMGEYFCSICIFYDDDTEKQQFHCDDCGICRVGGRENFFHCKKCGSCYAVGLRNNHRCVENSMRHHCPICYEYLFDSLKDTNVMKCGHTMHVECYNEMIKRDKFCCPICSRSVIDMSKTWQRLDEEIEATAMPSDYRDKKVWILCNDCNDTTEVHFHIIGQKCGHCRSYNTRAIAPPVLPQ

SEQ ID NO: 32566 - protein, 180 aa, Arabidopsis thaliana
  misc_feature (1)..(180): Ceres Seq. ID no. 13593506
MGEYFCSICIFYDDDTEKQQFHCDDCGICRVGGRENFFHCKKCGSCYAVGLRNNHRCVENSMRHHCPICYEYLFDSLKDTNVMKCGHTMHVECYNEMIKRDKFCCPICSRSVIDMSKTWQRLDEEIEATAMPSDYRDKKVWILCNDCNDTTEVHFHIIGQKCGHCRSYNTRAIAPPVLPQ

SEQ ID NO: 32567 - DNA, 1242 bp, Arabidopsis thaliana
  misc_feature (1)..(1242): Ceres Seq. ID no. 13593507
atgtttcagagattcaccttctttctaacagctcttctcattccatgtattctaattatccttagcccttcatatgccctcaaggaaggagaaacatgcatcgtgagcaagaattgtgatcggggattacactgtgaatcgtgtctcgccagcgatagtttccgacctagatgctcccgaatgcaacccattaacccgaccaccaaggtaaaagggttgccttacaacaagtactcatggttaacaacccacaattcatttgctcgaatgggtgcaaaatcaggcactggctctatgattcttgcaccttccaaccaacaagattcaatcacaagccaactccttaatggtgttagagggtttatgcttgacttgtacgacttccaaaacgatatatggctttgccattcttacggtggaaattgtttcaattacaccgcattccaacccgcggttaacattttaaaggagtttcaagtgtttctagacaagaacaaggatgttgttgtaacgcttatcctcgaggactatgtgaaatctcctaatggtttaaccagagtgtttgatgcatccggattacgaaacttcatgtttccggtatcaagaatgcctaaaaacggagaagattggcctactcttgatgatatgatatgtcagaaccaacgattgcttgttttcacgtctaatcctcaaaaagaagcgtcggagggaattgcgtttatgtggagatacatgatagagaatcaatatggagatggagggatgaaggctggagtgtgtaccaatagaccggaatcagttgcaatgggagatagatcaagatcacttattctagtcaattattttccggatactgcagatgtgatcggatcttgtaagcagaactctgctcctcttcttgacaccgtcaaaaactgtcaagaagcctcgggaaaacgttggcctaacttcattgcagtcgatttctacaagagaagcgatggtggaggagctccaaaagcagtggatgttgcaaacggtcatgcagtttgcggctgcgaagatatagccgcttgtaaagagaacatgccatatgggacgtgtgagaagcaagaagagaagaaaccggaatcaaacctaatgatgatagcaaaacttaccgcggaagcgactaaaggctatggccacccatctaccaaaccgaccctacttgggctttctgtgtttgttgtaacctttgtctcacttctctcaactttttga

SEQ ID NO: 32568 - protein, 413 aa, Arabidopsis thaliana
  misc_feature (1)..(413): Ceres Seq. ID no. 13593508
MFQRFTFFLTALLIPCILIILSPSYALKEGETCIVSKNCDRGLHCESCLASDSFRPRCSRMQPINPTTKVKGLPYNKYSWLTTHNSFARMGAKSGTGSMILAPSNQQDSITSQLLNGVRGFMLDLYDFQNDIWLCHSYGGNCFNYTAFQPAVNILKEFQVFLDKNKDVVVTLILEDYVKSPNGLTRVFDASGLRNFMFPVSRMPKNGEDWPTLDDMICQNQRLLVFTSNPQKEASEGIAFMWRYMIENQYGDGGMKAGVCTNRPESVAMGDRSRSLILVNYFPDTADVIGSCKQNSAPLLDTVKNCQEASGKRWPNFIAVDFYKRSDGGGAPKAVDVANGHAVCGCEDIAACKENMPYGTCEKQEEKKPESNLMMIAKLTAEATKGYGHPSTKPTLLGLSVFVVTFVSLLSTF

SEQ ID NO: 32569 - protein, 353 aa, Arabidopsis thaliana
  misc_feature (1)..(353): Ceres Seq. ID no. 13593509
MQPINPTTKVKGLPYNKYSWLTTHNSFARMGAKSGTGSMILAPSNQQDSITSQLLNGVRGFMLDLYDFQNDIWLCHSYGGNCFNYTAFQPAVNILKEFQVFLDKNKDVVVTLILEDYVKSPNGLTRVFDASGLRNFMFPVSRMPKNGEDWPTLDDMICQNQRLLVFTSNPQKEASEGIAFMWRYMIENQYGDGGMKAGVCTNRPESVAMGDRSRSLILVNYFPDTADVIGSCKQNSAPLLDTVKNCQEASGKRWPNFIAVDFYKRSDGGGAPKAVDVANGHAVCGCEDIAACKENMPYGTCEKQEEKKPESNLMMIAKLTAEATKGYGHPSTKPTLLGLSVFVVTFVSLLSTF

SEQ ID NO: 32570 - protein, 324 aa, Arabidopsis thaliana
  misc_feature (1)..(324): Ceres Seq. ID no. 13593510
MGAKSGTGSMILAPSNQQDSITSQLLNGVRGFMLDLYDFQNDIWLCHSYGGNCFNYTAFQPAVNILKEFQVFLDKNKDVVVTLILEDYVKSPNGLTRVFDASGLRNFMFPVSRMPKNGEDWPTLDDMICQNQRLLVFTSNPQKEASEGIAFMWRYMIENQYGDGGMKAGVCTNRPESVAMGDRSRSLILVNYFPDTADVIGSCKQNSAPLLDTVKNCQEASGKRWPNFIAVDFYKRSDGGGAPKAVDVANGHAVCGCEDIAACKENMPYGTCEKQEEKKPESNLMMIAKLTAEATKGYGHPSTKPTLLGLSVFVVTFVSLLSTF

SEQ ID NO: 32571 - DNA, 749 bp, Arabidopsis thaliana
  misc_feature (1)..(749): Ceres Seq. ID no. 13593511
gaagagttgaagaaaatcacagaaagccttagcacagagaagagagattgaagaagtcatggatgtttcaggaagcttgaattgcgttgttgtggcggtagatggaagcgaggtgagtatggaagctctgaggtgggctctagacaacctcaagctctcttcgtcttcttccgattcatcattcgtcgtgctccacgtccagccgtcgccttctgtagccgccggcgtgagtcccggcaccatacctttcggtggtcccagtggtcttgaggttcctgctttcactgctgcaatcgagcaacaccagaagcggatcaccgacaccatcctcgaacacgctagtcaaatttgtgctgaaaaatctgtgaatgtgaaaacacaagtggttattggggatcccaagtataaaatctgcgaagctgtagagaatttgcatgctgatcttcttgtcatgggctcccgggcttatggccgcattaagagaatgtttctgggaagtgtaagcaactactgcaccaaccacgcccattgtcctgttgtgataatcaaaccaaaagaggattcttctgcataaagaggatatatatgtacatatgcaaagggatatcaagaccatctgtaatcttttgaagttttgtgaatgtatagaagtcaagcaggaattatcccggattacttctcaaataagtggtgtgaatgtaaactaataagaggtacagagaacattgattggctcagtatatgtgttg

SEQ ID NO: 32572 - protein, 171 aa, Arabidopsis thaliana
  misc_feature (1)..(171): Ceres Seq. ID no. 13593512
MDVSGSLNCVVVAVDGSEVSMEALRWALDNLKLSSSSSDSSFVVLHVQPSPSVAAGVSPGTIPFGGPSGLEVPAFTAAIEQHQKRITDTILEHASQICAEKSVNVKTQVVIGDPKYKICEAVENLHADLLVMGSRAYGRIKRMFLGSVSNYCTNHAHCPVVIIKPKEDSSA

SEQ ID NO: 32573 - protein, 151 aa, Arabidopsis thaliana
  misc_feature (1)..(151): Ceres Seq. ID no. 13593513
MEALRWALDNLKLSSSSSDSSFVVLHVQPSPSVAAGVSPGTIPFGGPSGLEVPAFTAAIEQHQKRITDTILEHASQICAEKSVNVKTQVVIGDPKYKICEAVENLHADLLVMGSRAYGRIKRMFLGSVSNYCTNHAHCPVVIIKPKEDSSA

SEQ ID NO: 32574 - DNA, 1662 bp, Arabidopsis thaliana
  misc_feature (1)..(1662): Ceres Seq. ID no. 13593528
gattcatttgcacacttcttcttcttcttcctcatttctcttcctctcccatattccatggaattgctctacttcttcacctatgagagtaatatatcctcatgtactcaaaatactaatcaaacttcatgcttcaacaccaccttttcttaatcctccttcttcatcttcttcttccactatttcattttccctagtcggtgtaaatatcaaatggaggaagaacggcgagttctgttcggaaagtacgagatgggaaggttattaggcaaaggaaccttcgccaaagtctattacggcaaagagatcatcggcggcgagtgcgtcgcaatcaaagtcatcaacaaggatcaagtaatgaagagacctggaatgatggaacaaatcaaacgcgagatttcaatcatgaagctcgttcgtcatcccaacatagttgaattgaaagaagtcatggctacgaagaccaagatcttcttcgtcatggagttcgttaaaggcggcgagcttttctgcaaaatctctaaaggtaagttacacgaagacgctgctcgtagatatttccagcaattgatctcagccgttgattattgccatagtagaggcgtttctcatcgcgatctgaaacctgagaatcttcttttagatgagaatggagatttgaaaatctccgatttcggattatctgcgttaccggaacagattcttcaagacggattgcttcatacgcagtgtggaactccggcgtatgttgcgccggaggtattaaagaagaaaggatacgacggcgcgaaagctgatatctggtcgtgcggcgtcgttttgtatgttcttctcgccggatgtttgccgtttcaagatgagaatctgatgaatatgtatcggaagattttcagagcggattttgaatttccgccgtggttttctccggaagcgaggaggttgatttcgaaactcctcgttgtagatccagatcgacggatctcgattccggcgattatgagaacgccttggctccggaaaaacttcactccgccgttagctttcaaaatcgacgaaccgatttgttctcaaagcagcaaaaacaacgaagaagaagaagaagacggagattgtgaaaatcaaacagagccgatatcgccgaaattcttcaacgctttcgaattcatatcctcgatgtcttccggatttgacttatcgagcttgttcgagagcaagaggaaagtgcaatcggtgtttacgtcacggtcgtcggcgacggaggtaatggagaagatagaaacggttacgaaggagatgaacatgaaagtgaagagaacgaaggattttaaagtgaagatggaagggaaaacggaagggagaaaaggacggttgtcgatgacggcggaagtgtttgaagtagcgccggagatatcggtggtggagttttgcaaatcggcgggagatactttggagtacgataggttatacgaagaagaagtacggccggcgttaaacgacatcgtctggtcatggcacggtgataataataacacttcttccgaggattgttgaatcagtagtttttggttctgatttaaccggttatcggttaacgtagtataactaagaactgttacattgaacccaaattttctttggtttaataaaattttggttttactt

SEQ ID NO: 32575 - protein, 445 aa, Arabidopsis thaliana
  misc_feature (1)..(445): Ceres Seq. ID no. 13593529
MEEERRVLFGKYEMGRLLGKGTFAKVYYGKEIIGGECVAIKVINKDQVMKRPGMMEQIKREISIMKLVRHPNIVELKEVMATKTKIFFVMEFVKGGELFCKISKGKLHEDAARRYFQQLISAVDYCHSRGVSHRDLKPENLLLDENGDLKISDFGLSALPEQILQDGLLHTQCGTPAYVAPEVLKKKGYDGAKADIWSCGVVLYVLLAGCLPFQDENLMNMYRKIFRADFEFPPWFSPEARRLISKLLVVDPDRRISIPAIMRTPWLRKNFTPPLAFKIDEPICSQSSKNNEEEEEDGDCENQTEPISPKFFNAFEFISSMSSGFDLSSLFESKRKVQSVFTSRSSATEVMEKIETVTKEMNMKVKRTKDFKVKMEGKTEGRKGRLSMTAEVFEVAPEISVVEFCKSAGDTLEYDRLYEEEVRPALNDIVWSWHGDNNNTSSEDC

SEQ ID NO: 32576 - protein, 432 aa, Arabidopsis thaliana
  misc_feature (1)..(432): Ceres Seq. ID no. 13593530
MGRLLGKGTFAKVYYGKEIIGGECVAIKVINKDQVMKRPGMMEQIKREISIMKLVRHPNIVELKEVMATKTKIFFVMEFVKGGELFCKISKGKLHEDAARRYFQQLISAVDYCHSRGVSHRDLKPENLLLDENGDLKISDFGLSALPEQILQDGLLHTQCGTPAYVAPEVLKKKGYDGAKADIWSCGVVLYVLLAGCLPFQDENLMNMYRKIFRADFEFPPWFSPEARRLISKLLVVDPDRRISIPAIMRTPWLRKNFTPPLAFKIDEPICSQSSKNNEEEEEDGDCENQTEPISPKFFNAFEFISSMSSGFDLSSLFESKRKVQSVFTSRSSATEVMEKIETVTKEMNMKVKRTKDFKVKMEGKTEGRKGRLSMTAEVFEVAPEISVVEFCKSAGDTLEYDRLYEEEVRPALNDIVWSWHGDNNNTSSEDC

SEQ ID NO: 32577 - protein, 397 aa, Arabidopsis thaliana
  misc_feature (1)..(397): Ceres Seq. ID no. 13593531
MKRPGMMEQIKREISIMKLVRHPNIVELKEVMATKTKIFFVMEFVKGGELFCKISKGKLHEDAARRYFQQLISAVDYCHSRGVSHRDLKPENLLLDENGDLKISDFGLSALPEQILQDGLLHTQCGTPAYVAPEVLKKKGYDGAKADIWSCGVVLYVLLAGCLPFQDENLMNMYRKIFRADFEFPPWFSPEARRLISKLLVVDPDRRISIPAIMRTPWLRKNFTPPLAFKIDEPICSQSSKNNEEEEEDGDCENQTEPISPKFFNAFEFISSMSSGFDLSSLFESKRKVQSVFTSRSSATEVMEKIETVTKEMNMKVKRTKDFKVKMEGKTEGRKGRLSMTAEVFEVAPEISVVEFCKSAGDTLEYDRLYEEEVRPALNDIVWSWHGDNNNTSSEDC

SEQ ID NO: 32578 - DNA, 1077 bp, Arabidopsis thaliana
  misc_feature (1)..(1077): Ceres Seq. ID no. 13593536
aggaaaaaaaattctggaactttcgagcttctgttttgcggtgctctcaaagcttatatcggatctcgaatcttgaatcggactcagaacctcggatcttcgaaaatcgacgaacatgtcttctcctggcgaattctataactcacttccacctataaccaaggcttatggtacgttgtgctttttcactacagtagccacgcagcttggcttagttgctcccgttcacattgctttaattcctgaacttgtacttaagcagttccagatctggaggctgataacaaacttgtttttcctcggtggtttctctatcaattttggaatacgtcttttgatgatagcaagatatggagttcaactcgagaaagggccatttgaaaggcggacagcagactttttgtggatgatgatctttggatccttcactctattggtattatcagtcataccatttttctggacaccgtttcttggtgtttcacttgtgttcatgcttctttatctctggagccgagaatttccaaatgccaacatcagcctatacggtcttgtcactcttaaggctttctacctcccatgggcaatgctagcacttgatgttatcttcggttctccgatcatgccagatcttcttggcatcatagctggacatctatactacttcctaacagtccttcatcctcttgctaccggaaaaaactacctgaaaaccccaaaatgggttaataaaatcgtagcaagatggcgaattggagctccagttgcaagtgttcgacaagcaggtggtgtaggagcagcaggacccggagctggaggaggagtaggaggaggaggagcttattcaagcgctcgtgccccacccgagagttcaaacacagcattcagaggtcgatcatatcgtctcaccgactgaaatagaaatcttctcgagtttctttgttttcatcatatcaaatctttttcaaacaatgccactaactaatcccaggtagctttgtgttttcgaacagtacagtttttgaatatatgactctgtaggaagaatctttgaggttttaatacaatgttcttttc

SEQ ID NO: 32579 - protein, 266 aa, Arabidopsis thaliana
  misc_feature (1)..(266): Ceres Seq. ID no. 13593537
MSSPGEFYNSLPPITKAYGTLCFFTTVATQLGLVAPVHIALIPELVLKQFQIWRLITNLFFLGGFSINFGIRLLMIARYGVQLEKGPFERRTADFLWMMIFGSFTLLVLSVIPFFWTPFLGVSLVFMLLYLWSREFPNANISLYGLVTLKAFYLPWAMLALDVIFGSPIMPDLLGIIAGHLYYFLTVLHPLATGKNYLKTPKWVNKIVARWRIGAPVASVRQAGGVGAAGPGAGGGVGGGGAYSSARAPPESSNTAFRGRSYRLTD

SEQ ID NO: 32580 - protein, 192 aa, Arabidopsis thaliana
  misc_feature (1)..(192): Ceres Seq. ID no. 13593538
MIARYGVQLEKGPFERRTADFLWMMIFGSFTLLVLSVIPFFWTPFLGVSLVFMLLYLWSREFPNANISLYGLVTLKAFYLPWAMLALDVIFGSPIMPDLLGIIAGHLYYFLTVLHPLATGKNYLKTPKWVNKIVARWRIGAPVASVRQAGGVGAAGPGAGGGVGGGGAYSSARAPPESSNTAFRGRSYRLTD

SEQ ID NO: 32581 - protein, 169 aa, Arabidopsis thaliana
  misc_feature (1)..(169): Ceres Seq. ID no. 13593539
MMIFGSFTLLVLSVIPFFWTPFLGVSLVFMLLYLWSREFPNANISLYGLVTLKAFYLPWAMLALDVIFGSPIMPDLLGIIAGHLYYFLTVLHPLATGKNYLKTPKWVNKIVARWRIGAPVASVRQAGGVGAAGPGAGGGVGGGGAYSSARAPPESSNTAFRGRSYRLTD

SEQ ID NO: 32582 - DNA, 1386 bp, Arabidopsis thaliana
  misc_feature (1)..(1386): Ceres Seq. ID no. 13593549
ccaaaatctagggttttcttctcgcccaatttcacttttcttctacgaaattctccattcctgccggctgtcgggttttctgaatcgattctccttcaccaacttcttctctggttctgttcgattctgattttttttcaaggtcaattttttcttctctttaaactctgcaaaatcgtgatcgattaaattcacctcagggttttttgatttctgaaagaagttaatcttcttcgaaggcgattgcaaaagagtgctctgctgtgaatttccactgagatgcaatcaaaaccgggaagagaaaacgaagaggaagtcaataatcaccatgctgttcagcagccgatgatgtatgcagagccctggtggaaaaacaactcctttggtgttgtacctcaagcgagaccttctggaattccatcaaattcctcttctttggattgccccaatggttccgagtcaaacgatgttcattcagcatctgaagacggtgcgttgaatggtgaaaacgatggcacttggaaggattcacaagctgcaacttcctctcgttcagtagataatcacggaatggaaggaaatgacccagcgctctctatccgtaacatgcatgatcagccacttgtacaaccaccagagcttgttggacactatatcgcttgtgtcccaaacccatatcaggatccatattatgggggattgatgggagcatatggtcatcagcaattgggttttcgtccatatcttggaatgcctcgtgaaagaacagctctgccacttgacatggcacaagagcccgtttatgtgaatgcaaagcagtacgagggaattctaaggcgaagaaaagcacgtgccaaggcagagctagagaggaaagtcatccgggacagaaagccatatcttcacgagtcaagacacaagcatgcaatgagaagggcacgagcgagtggaggccggtttgcgaagaaaagtgaggtagaagcgggagaggatgcaggagggagagacagagaaaggggttcagcaaccaactcatcaggctctgaacaagttgagacagactctaatgagaccctgaattcttctggtgcaccataataaaaaaagccaaagctctgagaggagagagagacacacactttggctaatataatccattgcctcaaaccggcaaatcattcttggctttttcgtttttgtgtttgctagttgttcttgtcagagtctcatattgtgtgggtttaacagttatgatgaatgtacaaagagcgagttatgttaggtgttagattttggagacaagagacaaaggaatagcaagtaggtcttgtttttattctttgaccttttttttctcttttgcaaaattgaaaaatacgtttgctt

SEQ ID NO: 32583 - protein, 272 aa, Arabidopsis thaliana
  misc_feature (1)..(272): Ceres Seq. ID no. 13593550
MQSKPGRENEEEVNNHHAVQQPMMYAEPWWKNNSFGVVPQARPSGIPSNSSSLDCPNGSESNDVHSASEDGALNGENDGTWKDSQAATSSRSVDNHGMEGNDPALSIRNMHDQPLVQPPELVGHYIACVPNPYQDPYYGGLMGAYGHQQLGFRPYLGMPRERTALPLDMAQEPVYVNAKQYEGILRRRKARAKAELERKVIRDRKPYLHESRHKHAMRRARASGGRFAKKSEVEAGEDAGGRDRERGSATNSSGSEQVETDSNETLNSSGAP

SEQ ID NO: 32584 - protein, 250 aa, Arabidopsis thaliana
  misc_feature (1)..(250): Ceres Seq. ID no. 13593551
MMYAEPWWKNNSFGVVPQARPSGIPSNSSSLDCPNGSESNDVHSASEDGALNGENDGTWKDSQAATSSRSVDNHGMEGNDPALSIRNMHDQPLVQPPELVGHYIACVPNPYQDPYYGGLMGAYGHQQLGFRPYLGMPRERTALPLDMAQEPVYVNAKQYEGILRRRKARAKAELERKVIRDRKPYLHESRHKHAMRRARASGGRFAKKSEVEAGEDAGGRDRERGSATNSSGSEQVETDSNETLNSSGAP

SEQ ID NO: 32585 - protein, 249 aa, Arabidopsis thaliana
  misc_feature (1)..(249): Ceres Seq. ID no. 13593552
MYAEPWWKNNSFGVVPQARPSGIPSNSSSLDCPNGSESNDVHSASEDGALNGENDGTWKDSQAATSSRSVDNHGMEGNDPALSIRNMHDQPLVQPPELVGHYIACVPNPYQDPYYGGLMGAYGHQQLGFRPYLGMPRERTALPLDMAQEPVYVNAKQYEGILRRRKARAKAELERKVIRDRKPYLHESRHKHAMRRARASGGRFAKKSEVEAGEDAGGRDRERGSATNSSGSEQVETDSNETLNSSGAP

SEQ ID NO: 32586 - DNA, 1556 bp, Arabidopsis thaliana
  misc_feature (1)..(1556): Ceres Seq. ID no. 13593553
gaacgacgtcgtcttttcttctccgattagcgtcggtcgtcttcttcgtcttctctctgtcgctgatctgggttttgcttcaacgtgaaacatctttgaggttgatgatgaggtttctgtttacttaatatcctgtgagagaaaactcttcttgacttgagtgttgctgacaaaaacgtataggtatatgtacatttgttttcgctgaggctaaagatggataagcttcttgagaatcatcagtttgcgacacatgccatcgctgcctcggcctctgtctcgttaggaactgctctcgcttatcctttagataccatcaaaaccattatccaggttggttcaggacccaataagaaattaagctcctttcaagtttttaatagagttcttcgattctctggctattcaggtctgtacagtggtcttggatcgttaactttaggaagaatttctggttttggtgcaaggtttggtgtctatgagattctaacagctttctacaaagatggtcgacatgataactacgtgagtgttggtgaagcttttctggctggtctggtgggaggtgcagcagaaacagtgatgacttctccatttgagctaatcaaagtccgaaaacaagtgactgctgcatcacgggctccaaatgcttccgctgttgcagagaccgcaccggtctcacccatgatcacaaaactgctaagaagatacactcttgatgtaaagtcattgacacaaacagtcagtctcttatccgtcttaaatcacaaacacccaaacatgacagctgctttgcaagagtacccttggatgatgactggaacaggaaacccaccatcagccatggatgttaagagaccgctcgatgttgcatcacttgaaggatatagagctttatggaggaatctacgttcaggtcttataagagattgtatttacggtggagtattcttttcaacatggcagtttcttcacgaggcaatggtcggttggaaagctgttgggatgaatcctctgcccagttctgaagaagaagttggacctttatctccggtagccattagccttgctgctgggatatctggtgccgttgcagctgcagcatcacatagctttgacacagcaagaacacgtgcacagtgtgtaatattgccaaagtatacagcaaaggagaggaagtttctaaaatggaataaaccagggaagagattagagagatggacaggaatccatcctacagacagaaatctcttgttccgaggtattgggatgaggatggctcgaagctctgttgcatcgactgtgatcgtaggaagctattacttagctgtcgatttattggttcccaagtgagaaaacaaacaatcacataagcctacaaatctgtctttagatcagattaacgataccgcaatagtgattgttttttagtagcctgcgttttgttatacagttaacagagaaatcatatgtgagtttttctcaatactctgaaataaataattaacatcattggctgtatctgtaagtttgatgattacaaattatcaatttcc

SEQ ID NO: 32587 - protein, 378 aa, Arabidopsis thaliana
  misc_feature (1)..(378): Ceres Seq. ID no. 13593554
MDKLLENHQFATHAIAASASVSLGTALAYPLDTIKTIIQVGSGPNKKLSSFQVFNRVLRFSGYSGLYSGLGSLTLGRISGFGARFGVYEILTAFYKDGRHDNYVSVGEAFLAGLVGGAAETVMTSPFELIKVRKQVTAASRAPNASAVAETAPVSPMITKLLRRYTLDVKSLTQTVSLLSVLNHKHPNMTAALQEYPWMMTGTGNPPSAMDVKRPLDVASLEGYRALWRNLRSGLIRDCIYGGVFFSTWQFLHEAMVGWKAVGMNPLPSSEEEVGPLSPVAISLAAGISGAVAAAASHSFDTARTRAQCVILPKYTAKERKFLKWNKPGKRLERWTGIHPTDRNLLFRGIGMRMARSSVASTVIVGSYYLAVDLLVPK

SEQ ID NO: 32588 - protein, 256 aa, Arabidopsis thaliana
  misc_feature (1)..(256): Ceres Seq. ID no. 13593555
MTSPFELIKVRKQVTAASRAPNASAVAETAPVSPMITKLLRRYTLDVKSLTQTVSLLSVLNHKHPNMTAALQEYPWMMTGTGNPPSAMDVKRPLDVASLEGYRALWRNLRSGLIRDCIYGGVFFSTWQFLHEAMVGWKAVGMNPLPSSEEEVGPLSPVAISLAAGISGAVAAAASHSFDTARTRAQCVILPKYTAKERKFLKWNKPGKRLERWTGIHPTDRNLLFRGIGMRMARSSVASTVIVGSYYLAVDLLVPK

SEQ ID NO: 32589 - protein, 222 aa, Arabidopsis thaliana
  misc_feature (1)..(222): Ceres Seq. ID no. 13593556
MITKLLRRYTLDVKSLTQTVSLLSVLNHKHPNMTAALQEYPWMMTGTGNPPSAMDVKRPLDVASLEGYRALWRNLRSGLIRDCIYGGVFFSTWQFLHEAMVGWKAVGMNPLPSSEEEVGPLSPVAISLAAGISGAVAAAASHSFDTARTRAQCVILPKYTAKERKFLKWNKPGKRLERWTGIHPTDRNLLFRGIGMRMARSSVASTVIVGSYYLAVDLLVPK

SEQ ID NO: 32590 - DNA, 1740 bp, Arabidopsis thaliana
  misc_feature (1)..(1740): Ceres Seq. ID no. 13593561
gattttccaaagtctgtttatttttttaatctctctctcttctctctcacccaatttcacaaacccgaaaccctaattttctcgggacactgaaatttttacagcttctttcctcttcttcaccggggagatttgtcggtactaaatctagggtttttgggtatcaccggagggttgaagagagagaaaaaaactcacaatggaatcagatcagggaaagctatttatcggcgggatttcatgggataccgacgagaatcttctgagagagtacttcagcaatttcggcgaggttttgcaggtcactgttatgcgagagaaagctactggtcgtcctagaggattcggattcgtcgcattctcggatcctgctgttattgatagggttcttcaggacaagcaccatattgataatagagatgttgatgtgaagagagcaatgtctagagaggagcagagtcctgctgggagatcagggacttttaatgcttctaggaattttgatagtggagctaacgtgaggactaagaagatattcgtgggaggtttgcctcctgcattaacatcagatgaatttcgggcttactttgagacttatggtcctgtgagtgatgcagtcattatgattgatcagactacacagcgtcctcgaggatttgggtttgtttcttttgattctgaagattcggttgaccttgttttacataagactttccacgatttgaatggtaaacaagtcgaagttaaaagagctcttcctaaagatgctaaccctggaatagccagtggtggtggtcgtggcagtggtggagctggagggtttccgggctatggtggttctggtggaagtggctatgagggtcgtgtggattctaatagatacatgcagccgcaaaacactggaagtggttatcctccttatggtggttctgggtatggtactggttatggttatggaagcaatggtgtaggttatgggggttttggtgggtatggcaatccagctggtgcgccttatgggaatcctagtgtccctggagctgggtttggaagtggtccaagaagttcatggggcgctcaagcaccatcgggttatgggaatgtgggatatggaaatgcagctccgtggggtggttctggtggtcctggttcagcagtaatgggtcaagctggtgcatctgcaggttatggcagtcaaggttatggctatggtggaaatgattcctcttacgggactccatctgcctatggtgcagtaggggggcgatctgggaatatgcctaacaaccatggtggcggtggctatgcggatgctttagatggctctggaggctatgggaatcaccaagggaacaacgggcaagctggttatggtggaggttatggaagtggtaggcaagctcaacaacagtgattgaagaagaaatactactagaatgtggttttatcgctgaccttgaaacctcctgctttccgccttaaccatgtcacgtctttggcggttagaccaggaggtggacctacgctggattatctcttttgttagtttctcaataagttgttttcaggcaattccggatactatttcctatcaagttgtagtttttaagtttgcgtgcttatttatatttgtcgctttggaatggttttctttctctgttatcctctagtgtttgtgtttaacgatacatcctccagattatcattattcatctcccttttggttcattcatttttgtt

SEQ ID NO: 32591 - protein, 404 aa, Arabidopsis thaliana
  misc_feature (1)..(404): Ceres Seq. ID no. 13593562
MESDQGKLFIGGISWDTDENLLREYFSNFGEVLQVTVMREKATGRPRGFGFVAFSDPAVIDRVLQDKHHIDNRDVDVKRAMSREEQSPAGRSGTFNASRNFDSGANVRTKKIFVGGLPPALTSDEFRAYFETYGPVSDAVIMIDQTTQRPRGFGFVSFDSEDSVDLVLHKTFHDLNGKQVEVKRALPKDANPGIASGGGRGSGGAGGFPGYGGSGGSGYEGRVDSNRYMQPQNTGSGYPPYGGSGYGTGYGYGSNGVGYGGFGGYGNPAGAPYGNPSVPGAGFGSGPRSSWGAQAPSGYGNVGYGNAAPWGGSGGPGSAVMGQAGASAGYGSQGYGYGGNDSSYGTPSAYGAVGGRSGNMPNNHGGGGYADALDGSGGYGNHQGNNGQAGYGGGYGSGRQAQQQ

SEQ ID NO: 32592 - protein, 367 aa, Arabidopsis thaliana
  misc_feature (1)..(367): Ceres Seq. ID no. 13593563
MREKATGRPRGFGFVAFSDPAVIDRVLQDKHHIDNRDVDVKRAMSREEQSPAGRSGTFNASRNFDSGANVRTKKIFVGGLPPALTSDEFRAYFETYGPVSDAVIMIDQTTQRPRGFGFVSFDSEDSVDLVLHKTFHDLNGKQVEVKRALPKDANPGIASGGGRGSGGAGGFPGYGGSGGSGYEGRVDSNRYMQPQNTGSGYPPYGGSGYGTGYGYGSNGVGYGGFGGYGNPAGAPYGNPSVPGAGFGSGPRSSWGAQAPSGYGNVGYGNAAPWGGSGGPGSAVMGQAGASAGYGSQGYGYGGNDSSYGTPSAYGAVGGRSGNMPNNHGGGGYADALDGSGGYGNHQGNNGQAGYGGGYGSGRQAQQQ

SEQ ID NO: 32593 - protein, 324 aa, Arabidopsis thaliana
  misc_feature (1)..(324): Ceres Seq. ID no. 13593564
MSREEQSPAGRSGTFNASRNFDSGANVRTKKIFVGGLPPALTSDEFRAYFETYGPVSDAVIMIDQTTQRPRGFGFVSFDSEDSVDLVLHKTFHDLNGKQVEVKRALPKDANPGIASGGGRGSGGAGGFPGYGGSGGSGYEGRVDSNRYMQPQNTGSGYPPYGGSGYGTGYGYGSNGVGYGGFGGYGNPAGAPYGNPSVPGAGFGSGPRSSWGAQAPSGYGNVGYGNAAPWGGSGGPGSAVMGQAGASAGYGSQGYGYGGNDSSYGTPSAYGAVGGRSGNMPNNHGGGGYADALDGSGGYGNHQGNNGQAGYGGGYGSGRQAQQQ

SEQ ID NO: 32594 - DNA, 1074 bp, Arabidopsis thaliana
  misc_feature (1)..(1074): Ceres Seq. ID no. 13593579
atgtataagaatcagttgcaagagcttgcacagaggagttgtttcagtctcccatcatatacatgcacaagagaaggaccagatcatgctccaagattcaaagctagtgtaaacttcaatggtgagatatttgaaagcccaacttactgttctactctcagacaagctgagcattcagctgctgaagttgctcttagtgctctctcttccaaaggtccttcaaagtctctaactgctagagatgagactgggatctacaagaatctgcttcaagagacagcacacagagctggtcttgatctaccggtttacacaagtgtgagatcaggacctggtcacatcccaacattctcttgtactgtggagcttgctggaatgagttttaatggagaatcagcaaagactaagaaacaagctgagaagaatgcagccattgcagcttggttctccttgagaaaaatgccaagattggacccattgagaggtgaagagaaggaacaagagatagttgcaagagtcctctcaagatttagacccaaagaagtgaaaagaagagaaccaaaccagtcaagaagaagaacagtcatcagaacaattcgccaaaacacaacaacaacaacaacaaccacaggagacttgttgtgtgagaaactcagatccatcaatctatataccaatgaagcttcatcatcatcaccaccaccacagagattctggccttcaagaacaaatctcacacaagaacaatccaaagtcaaatcattgctagagaaatgtcaagaatatgcagagaagaaacagagcctagatgatcctaagccagagatgagaatcaaaacatcatcaccatcaccattatcatcatcagtggagagaaactgttatagtaagctcttaccctttccaagttttgtgttaaaccatcagaaactagctccagcagttcacatcagatcagtgatcccagtttgttcagctcctccaccaaaacctaaccctaaccctaattcatcaccgttcatcacaagggagctgggaaatggaagccaagagaagaagtcattaccaaattag

SEQ ID NO: 32595 - protein, 357 aa, Arabidopsis thaliana
  misc_feature (1)..(357): Ceres Seq. ID no. 13593580
MYKNQLQELAQRSCFSLPSYTCTREGPDHAPRFKASVNFNGEIFESPTYCSTLRQAEHSAAEVALSALSSKGPSKSLTARDETGIYKNLLQETAHRAGLDLPVYTSVRSGPGHIPTFSCTVELAGMSFNGESAKTKKQAEKNAAIAAWFSLRKMPRLDPLRGEEKEQEIVARVLSRFRPKEVKRREPNQSRRRTVIRTIRQNTTTTTTTTGDLLCEKLRSINLYTNEASSSSPPPQRFWPSRTNLTQEQSKVKSLLEKCQEYAEKKQSLDDPKPEMRIKTSSPSPLSSSVERNCYSKLLPFPSFVLNHQKLAPAVHIRSVIPVCSAPPPKPNPNPNSSPFITRELGNGSQEKKSLPN

SEQ ID NO: 32596 - protein, 232 aa, Arabidopsis thaliana; identical to SEQ ID NO: 28947
  misc_feature (1)..(232): Ceres Seq. ID no. 13593581

SEQ ID NO: 32597 - protein, 204 aa, Arabidopsis thaliana; identical to SEQ ID NO: 28948
  misc_feature (1)..(204): Ceres Seq. ID no. 13593582

SEQ ID NO: 32598 - DNA, 1932 bp, Arabidopsis thaliana
  misc_feature (1)..(1932): Ceres Seq. ID no. 13593583
tctacctcctcctcattttctcctcttgattcactaattcttcttcttcttcttcttttcagacatgactcttccttatcgtttctcttccgttagaaaccactcacttctacttaagacttctcatctctgcacacccagatcagctcttggttgttgtttctctcccaaggaatcccctttcttcaggaagaacactgcccaattcctttctcctcagaaacacacttctcttcctctgaaacttgtctgccctttagctagtttctcttcttatgcggattctgagggagaagagcaacaccatgctgatcaaccgatacagaaccctcacgaatcttctaccgtttcaaacgaatcagatgggaaaggtaatgcagaagctactggagacttttctggaatggctcaagcctttcacatttcttccacaacagcaagggcaatctctatagtcatcgccttctctgctctcacccttccaatcttcatgaagtccctgggacaaggactggctctcaagaccaagcttctctcttacgcaacactactctttggtttctacatggcctggaacatcggagctaatgatgtcgcaaatgccatggggacttctgttggatctggagccttgacaatccggcaagctgtgatgacagctgcagttctcgaattctcaggtgctcttttgatgggaactcacgtgactagcacgatgcagaaaggaattctcatggctaatgtgttccaagggaaagatatgttgctctttgctggtctcctctcttccttagctgcagctggaacttggttacaggtagcttcttactatggatggccagtatcaacaactcactgtatcgtcggatcaatggttgggtttgggcttgtatatggaggagctggtgccgttttctggagttccctagctaaagtagcttcatcttgggtcatctctcctatactgggagctcttgtctccttcctagtctacaaatgcatcaggagatttgtttacagtgcaccaaacccaggacaagcagcggctgctgccgctcccgtcgctgtatttgtaggtgtggccagtatctcctcagccgcattgcctctaagtaagatctttccaatagctctatcacaagccttagcctgtggagtagcaggagccatagtattcgacagaatcatccgcaaacagctcggtcacctcctagctaaaacaaaatcaccagaaacatctcaaaaccaacccaaaaccattggtttcctctccgatatcgcaggaccaacaggtacacaactcgaaatagtctacggaatctttggctatatgcaagtcctctccgcttgcttcatgtcattcgctcacggaggcaacgacgtctccaacgcaatcggaccattagccgccgcattaagcattctccaaaacggagcagctgcaggaggagccgagatcgttatcccaatggatgttctcgcttggggaggattcggaatcgttgctggtctcacaatgtggggatacagagtcatcgcaacgatagggaagaagatcactgagctaacaccaacaagaggattcgctgcggaattcgccgccgcgtcggttgttttgtttgcttcgaaattagggcttccgatttctgcgactcatacacttgttggtgctgtgatgggtgttggtttcgctagagggcttaatagtgtgagagctgagactgtgagagagatcgttgcttcgtggcttgtcaccattcccgttggtgctacactcgccgttatctacacttggattttcaccaagatcttatcttttgtattgtgagtttctgtttcttttggttttgttatacgaagaacatgaaattgatcttcttcttctatgttcgtttgaatgattcgagtttgaaaaaaccctaaagttatcat

SEQ ID NO: 32599 - protein, 587 aa, Arabidopsis thaliana
  misc_feature (1)..(587): Ceres Seq. ID no. 13593584
MTLPYRFSSVRNHSLLLKTSHLCTPRSALGCCFSPKESPFFRKNTAQFLSPQKHTSLPLKLVCPLASFSSYADSEGEEQHHADQPIQNPHESSTVSNESDGKGNAEATGDFSGMAQAFHISSTTARAISIVIAFSALTLPIFMKSLGQGLALKTKLLSYATLLFGFYMAWNIGANDVANAMGTSVGSGALTIRQAVMTAAVLEFSGALLMGTHVTSTMQKGILMANVFQGKDMLLFAGLLSSLAAAGTWLQVASYYGWPVSTTHCIVGSMVGFGLVYGGAGAVFWSSLAKVASSWVISPILGALVSFLVYKCIRRFVYSAPNPGQAAAAAAPVAVFVGVASISSAALPLSKIFPIALSQALACGVAGAIVFDRIIRKQLGHLLAKTKSPETSQNQPKTIGFLSDIAGPTGTQLEIVYGIFGYMQVLSACFMSFAHGGNDVSNAIGPLAAALSILQNGAAAGGAEIVIPMDVLAWGGFGIVAGLTMWGYRVIATIGKKITELTPTRGFAAEFAAASVVLFASKLGLPISATHTLVGAVMGVGFARGLNSVRAETVREIVASWLVTIPVGATLAVIYTWIFTKILSFVL

SEQ ID NO: 32600 - protein, 474 aa, Arabidopsis thaliana
  misc_feature (1)..(474): Ceres Seq. ID no. 13593585
MAQAFHISSTTARAISIVIAFSALTLPIFMKSLGQGLALKTKLLSYATLLFGFYMAWNIGANDVANAMGTSVGSGALTIRQAVMTAAVLEFSGALLMGTHVTSTMQKGILMANVFQGKDMLLFAGLLSSLAAAGTWLQVASYYGWPVSTTHCIVGSMVGFGLVYGGAGAVFWSSLAKVASSWVISPILGALVSFLVYKCIRRFVYSAPNPGQAAAAAAPVAVFVGVASISSAALPLSKIFPIALSQALACGVAGAIVFDRIIRKQLGHLLAKTKSPETSQNQPKTIGFLSDIAGPTGTQLEIVYGIFGYMQVLSACFMSFAHGGNDVSNAIGPLAAALSILQNGAAAGGAEIVIPMDVLAWGGFGIVAGLTMWGYRVIATIGKKITELTPTRGFAAEFAAASVVLFASKLGLPISATHTLVGAVMGVGFARGLNSVRAETVREIVASWLVTIPVGATLAVIYTWIFTKILSFVL

SEQ ID NO: 32601 - protein, 445 aa, Arabidopsis thaliana
  misc_feature (1)..(445): Ceres Seq. ID no. 13593586
MKSLGQGLALKTKLLSYATLLFGFYMAWNIGANDVANAMGTSVGSGALTIRQAVMTAAVLEFSGALLMGTHVTSTMQKGILMANVFQGKDMLLFAGLLSSLAAAGTWLQVASYYGWPVSTTHCIVGSMVGFGLVYGGAGAVFWSSLAKVASSWVISPILGALVSFLVYKCIRRFVYSAPNPGQAAAAAAPVAVFVGVASISSAALPLSKIFPIALSQALACGVAGAIVFDRIIRKQLGHLLAKTKSPETSQNQPKTIGFLSDIAGPTGTQLEIVYGIFGYMQVLSACFMSFAHGGNDVSNAIGPLAAALSILQNGAAAGGAEIVIPMDVLAWGGFGIVAGLTMWGYRVIATIGKKITELTPTRGFAAEFAAASVVLFASKLGLPISATHTLVGAVMGVGFARGLNSVRAETVREIVASWLVTIPVGATLAVIYTWIFTKILSFVL

SEQ ID NO: 32602 - DNA, 2313 bp, Arabidopsis thaliana
  misc_feature (1)..(2313): Ceres Seq. ID no. 13593606
atggcgatggggaagtattcccgtgtagacgggaagaaatcatcgagctatggtttaaccattaccattgttctgttactttccctctgtttagttgggacatggatgttcatgtcttcttggtcagcccctgctgattctgctggctactcctcaactgatactgctaaagatgtttctaagaatgacttgagaaaagaagaaggcgatcgagatccgaagaacttttctgatgaaaagaatgaagaaaatgaggctgcgactgagaacaaccaagtgaagactgattctgagaactctgctgagggaaaccaggtcaatgagagctctggcgagaaaactgaagcaggcgaggaaagaaaagagtctgatgacaacaatggtgatggagatggggagaaagagaagaatgtgaaagaagtaggatccgaaagtgatgaaacaacgcagaaagagaaaacgcaactggaagagagcacagaagaaaataagtccgaggatggtaatggcaacgaagagaaggctgaagagaatgctagtgaaactgaagaaagcacggagaagagtagcaaggaagtctttccagctggtgaccaggctgaaattacaaaagagtcgagcactggagatggagcttggtcaacccaattggttgagtcgcagaacgagaagaaagcacaacagtcctcgatatctaaggaccaaagtagctatggatggaaaacgtgcaatgtgactgctggtccagactacatcccttgccttgacaattggcaggctatcaaaaagcttcatactacaatgcactatgaacatcgcgagcgccattgtcctgaggaatctcctcattgtcttgtgtctctgcctgatggttataagcggtccatcaagtggccaaagagcagggaaaagatctggtacaacaatgttccccacaccaagcttgcagagatcaaggggcatcaaaattgggtgaagatgagtggtgaacatctgacgttccctggtggtggtactcagtttaagaatggtgctcttcattacattgatttcatccaacagtcacatcctgctattgcatggggaaatagaacccgtgttatattggatgtcggatgtggagttgctagctttggtggttaccttttcgaaagagatgtgcttgctttgtcatttgctcccaaagatgagcatgaggcgcaagtgcaattcgcgctggaacgtggtattcctgcaatgttaaacgttatgggaaccaaaagattaccgtttcccggttctgtttttgaccttatccattgtgctcgttgtagagtcccttggcatattgaaggtggtaaacttcttttggaattgaaccgtgctttgaggccgggtggtttctttgtctggtcagcgactccagtctatagaaagaacgaggaagattctggtatatggaaagcaatgtcggaactcacaaaggcaatgtgctggaagctggtgacaattaagaaagacaaactgaatgaggttggtgccgccatataccaaaagccaacttcaaataaatgttacaacaaaagacctcaaaatgagccacctctctgcaaggattccgatgatcaaaatgcagcctggaatgttccacttgaggcatgtatgcataaagtgacagaagattcatcaaagcgaggagcagtgtggccaaacatgtggccagagagggttgaaactgcgcctgagtggttggattcgcaggaaggtgtttatggaaaacctgcaccagaagatttcacagcagaccaagagaagtggaaaactattgtctcaaaggcataccttaatgacatgggaatcgattggtctaatgtgagaaacgtgatggacatgagagcagtctatggaggatttgctgctgcgttgaaggatttgaagttatgggtgatgaacgtggttcctgtggatgcgccagatacacttcccatcatatatgaacgtggtttatttggaatctatcatgactggtgtgaatcattcaacacttatcccagaacttacgaccttctccatgccgatcatcttttctctaccctgaggaagaggtgcaatttggtgtcggtaatggctgagattgatcggattcttaggccacaaggaactttcatcataagggatgacatggaaacattaggagaagttgagaaaatggtgaaatctatgaaatggaaggttaaaatgacgcagtccaaagacaatgaaggcttgctttcaattgaaaagtcatggtggcgtcctgaagaaactgagacaatcaaatcggcaatcgcttaa

SEQ ID NO: 32603 - protein, 770 aa, Arabidopsis thaliana
  misc_feature (1)..(770): Ceres Seq. ID no. 13593607
MAMGKYSRVDGKKSSSYGLTITIVLLLSLCLVGTWMFMSSWSAPADSAGYSSTDTAKDVSKNDLRKEEGDRDPKNFSDEKNEENEAATENNQVKTDSENSAEGNQVNESSGEKTEAGEERKESDDNNGDGDGEKEKNVKEVGSESDETTQKEKTQLEESTEENKSEDGNGNEEKAEENASETEESTEKSSKEVFPAGDQAEITKESSTGDGAWSTQLVESQNEKKAQQSSISKDQSSYGWKTCNVTAGPDYIPCLDNWQAIKKLHTTMHYEHRERHCPEESPHCLVSLPDGYKRSIKWPKSREKIWYNNVPHTKLAEIKGHQNWVKMSGEHLTFPGGGTQFKNGALHYIDFIQQSHPAIAWGNRTRVILDVGCGVASFGGYLFERDVLALSFAPKDEHEAQVQFALERGIPAMLNVMGTKRLPFPGSVFDLIHCARCRVPWHIEGGKLLLELNRALRPGGFFVWSATPVYRKNEEDSGIWKAMSELTKAMCWKLVTIKKDKLNEVGAAIYQKPTSNKCYNKRPQNEPPLCKDSDDQNAAWNVPLEACMHKVTEDSSKRGAVWPNMWPERVETAPEWLDSQEGVYGKPAPEDFTADQEKWKTIVSKAYLNDMGIDWSNVRNVMDMRAVYGGFAAALKDLKLWVMNVVPVDAPDTLPIIYERGLFGIYHDWCESFNTYPRTYDLLHADHLFSTLRKRCNLVSVMAEIDRILRPQGTFIIRDDMETLGEVEKMVKSMKWKVKMTQSKDNEGLLSIEKSWWRPEETETIKSAIA

SEQ ID NO: 32604 - protein, 768 aa, Arabidopsis thaliana
  misc_feature (1)..(768): Ceres Seq. ID no. 13593608
MGKYSRVDGKKSSSYGLTITIVLLLSLCLVGTWMFMSSWSAPADSAGYSSTDTAKDVSKNDLRKEEGDRDPKNFSDEKNEENEAATENNQVKTDSENSAEGNQVNESSGEKTEAGEERKESDDNNGDGDGEKEKNVKEVGSESDETTQKEKTQLEESTEENKSEDGNGNEEKAEENASETEESTEKSSKEVFPAGDQAEITKESSTGDGAWSTQLVESQNEKKAQQSSISKDQSSYGWKTCNVTAGPDYIPCLDNWQAIKKLHTTMHYEHRERHCPEESPHCLVSLPDGYKRSIKWPKSREKIWYNNVPHTKLAEIKGHQNWVKMSGEHLTFPGGGTQFKNGALHYIDFIQQSHPAIAWGNRTRVILDVGCGVASFGGYLFERDVLALSFAPKDEHEAQVQFALERGIPAMLNVMGTKRLPFPGSVFDLIHCARCRVPWHIEGGKLLLELNRALRPGGFFVWSATPVYRKNEEDSGIWKAMSELTKAMCWKLVTIKKDKLNEVGAAIYQKPTSNKCYNKRPQNEPPLCKDSDDQNAAWNVPLEACMHKVTEDSSKRGAVWPNMWPERVETAPEWLDSQEGVYGKPAPEDFTADQEKWKTIVSKAYLNDMGIDWSNVRNVMDMRAVYGGFAAALKDLKLWVMNVVPVDAPDTLPIIYERGLFGIYHDWCESFNTYPRTYDLLHADHLFSTLRKRCNLVSVMAEIDRILRPQGTFIIRDDMETLGEVEKMVKSMKWKVKMTQSKDNEGLLSIEKSWWRPEETETIKSAIA

SEQ ID NO: 32605 - protein, 735 aa, Arabidopsis thaliana
  misc_feature (1)..(735): Ceres Seq. ID no. 13593609
MFMSSWSAPADSAGYSSTDTAKDVSKNDLRKEEGDRDPKNFSDEKNEENEAATENNQVKTDSENSAEGNQVNESSGEKTEAGEERKESDDNNGDGDGEKEKNVKEVGSESDETTQKEKTQLEESTEENKSEDGNGNEEKAEENASETEESTEKSSKEVFPAGDQAEITKESSTGDGAWSTQLVESQNEKKAQQSSISKDQSSYGWKTCNVTAGPDYIPCLDNWQAIKKLHTTMHYEHRERHCPEESPHCLVSLPDGYKRSIKWPKSREKIWYNNVPHTKLAEIKGHQNWVKMSGEHLTFPGGGTQFKNGALHYIDFIQQSHPAIAWGNRTRVILDVGCGVASFGGYLFERDVLALSFAPKDEHEAQVQFALERGIPAMLNVMGTKRLPFPGSVFDLIHCARCRVPWHIEGGKLLLELNRALRPGGFFVWSATPVYRKNEEDSGIWKAMSELTKAMCWKLVTIKKDKLNEVGAAIYQKPTSNKCYNKRPQNEPPLCKDSDDQNAAWNVPLEACMHKVTEDSSKRGAVWPNMWPERVETAPEWLDSQEGVYGKPAPEDFTADQEKWKTIVSKAYLNDMGIDWSNVRNVMDMRAVYGGFAAALKDLKLWVMNVVPVDAPDTLPIIYERGLFGIYHDWCESFNTYPRTYDLLHADHLFSTLRKRCNLVSVMAEIDRILRPQGTFIIRDDMETLGEVEKMVKSMKWKVKMTQSKDNEGLLSIEKSWWRPEETETIKSAIA

SEQ ID NO: 32606 - DNA, 1414 bp, Arabidopsis thaliana
  misc_feature (1)..(1414): Ceres Seq. ID no. 13593611
aacccacccaaaatatcacaagcaccgactaaaacaattcggatctaaacccgacccggtaaaaccaatcccaaattttactccgttgtgaacgcatcaaacccagaaaatttcttcctccgatctcgcattctccacttccataatccccaaaattgtttcgttgatttttccacaagatgaagctaacggacaacgaagagatcaccatgaacggaactcgagaaatggagacgacagagcaagagacatcgtcgccgtgttcgttagtaatcgaagcttttccggtgaagaaatccattattgtaggttacgctcttacatcaaagaagattaagagctttttacaaccaaaactcgaaggtttagctaggaataaggggatattatttgtggcaatagatcagaataagccactttcagagcagggtccgtttgatattgtgttgcataagcaaattggaaaagaatggcgtcgaattctcgaggaatttaggctagcacatccagatgtcacagttcttgatcctccagatgcaatactacatctccgtaatcgtcagtcaatgcttcagtgtgttgcggacatgaatctgtctgatagtaatggacgcgttggtgtgcccaagcaattggtaattaaaaaggatgcatcttcaattccggaggctgtcaataatgctggtctgagactacctcttgttgcaaagccattggttgctgatggaagtgcaaagtcacatgagctttcgctggcttacgatcaacactcccttctgaagctcgagcctcctcttgttcttcaggagtttgttaaccatggaggtgttcttttcaaggtttacattgttggggaggctattagagttgtccggcgcttctccctacctgatgtctctagacgagaactccccaaatcagctggtgtattccgcttcccacgggtctcttgtgctgcagcttcagctgatgatgcagatctggacccgagcattgccgagcttccaccacgtcctctgttggagagactggcaaaggaactccgtcgtggattgggtctaaggctgttcaatttagacataattagagagcacgggacaagagatcggttttatgtgatcgacatcaactatttcccagggtacgggaaaatgccagagtatgagcatgtattcactgatttcttactgagtgtggtacaaagccaatgtaagaaacgagctttggcagatcaatactaaactcaacggagagaccattgttcctccccaaagaaaaaaagaagattagtagtctatgcaatttatttctgtacaggacaaagcaccgatttccctcgatgttgttctttagcttcattgtgctgtacaaaagaacaatggaagattgcatttaaaagaaaatccttgggacc

SEQ ID NO: 32607 - protein, 353 aa, Arabidopsis thaliana
  misc_feature (1)..(353): Ceres Seq. ID no. 13593612
MKLTDNEEITMNGTREMETTEQETSSPCSLVIEAFPVKKSIIVGYALTSKKIKSFLQPKLEGLARNKGILFVAIDQNKPLSEQGPFDIVLHKQIGKEWRRILEEFRLAHPDVTVLDPPDAILHLRNRQSMLQCVADMNLSDSNGRVGVPKQLVIKKDASSIPEAVNNAGLRLPLVAKPLVADGSAKSHELSLAYDQHSLLKLEPPLVLQEFVNHGGVLFKVYIVGEAIRVVRRFSLPDVSRRELPKSAGVFRFPRVSCAAASADDADLDPSIAELPPRPLLERLAKELRRGLGLRLFNLDIIREHGTRDRFYVIDINYFPGYGKMPEYEHVFTDFLLSVVQSQCKKRALADQY

SEQ ID NO: 32608 - protein, 343 aa, Arabidopsis thaliana
  misc_feature (1)..(343): Ceres Seq. ID no. 13593613
MNGTREMETTEQETSSPCSLVIEAFPVKKSIIVGYALTSKKIKSFLQPKLEGLARNKGILFVAIDQNKPLSEQGPFDIVLHKQIGKEWRRILEEFRLAHPDVTVLDPPDAILHLRNRQSMLQCVADMNLSDSNGRVGVPKQLVIKKDASSIPEAVNNAGLRLPLVAKPLVADGSAKSHELSLAYDQHSLLKLEPPLVLQEFVNHGGVLFKVYIVGEAIRVVRRFSLPDVSRRELPKSAGVFRFPRVSCAAASADDADLDPSIAELPPRPLLERLAKELRRGLGLRLFNLDIIREHGTRDRFYVIDINYFPGYGKMPEYEHVFTDFLLSVVQSQCKKRALADQY

SEQ ID NO: 32609 - protein, 337 aa, Arabidopsis thaliana
  misc_feature (1)..(337): Ceres Seq. ID no. 13593614
METTEQETSSPCSLVIEAFPVKKSIIVGYALTSKKIKSFLQPKLEGLARNKGILFVAIDQNKPLSEQGPFDIVLHKQIGKEWRRILEEFRLAHPDVTVLDPPDAILHLRNRQSMLQCVADMNLSDSNGRVGVPKQLVIKKDASSIPEAVNNAGLRLPLVAKPLVADGSAKSHELSLAYDQHSLLKLEPPLVLQEFVNHGGVLFKVYIVGEAIRVVRRFSLPDVSRRELPKSAGVFRFPRVSCAAASADDADLDPSIAELPPRPLLERLAKELRRGLGLRLFNLDIIREHGTRDRFYVIDINYFPGYGKMPEYEHVFTDFLLSVVQSQCKKRALADQY

SEQ ID NO: 32610 - DNA, 3546 bp, Arabidopsis thaliana
  misc_feature (1)..(3546): Ceres Seq. ID no. 13593638
atggtgaaatcagcagcttctcagtcaccatctccggtgactataacggtgacaccatgtaaaggatccggcgacagaagcttaggattgacgagtcctatcccacgcgcctccgtcatcaccaaccaaaactctcctctaagctcaagagccacgcgtcgcacttccattagcagcgggaatcggagatctaacggtgatgaaggaagatactgttctatgtctgtggaagatctaacggcggagacgactaattcagagtgcgttctgagctatactgttcatatcccacctacgccggatcatcagacggtgttcgcttcacaggagagtgaagaagacgagatgctaaaagggaattcgaatcaaaaaagtttcctctctgggacgattttcaccggtgggtttaaatcggtgacacgtggtcatgtgatcgattgttctatggatagagctgatccggagaagaagtcaggtcagatctgctggttaaaaggttgtgatgagaaagttgttcacgggagatgtgagtgtggtttccgaatctgtagagattgttactttgattgtatcacaagtggtggaggcaattgtcctggttgcaaagagccttatagggatatcaacgatgatccagagactgaggaagaagacgaagaagatgaggcgaaaccacttcctcagatgggtgaatcaaagcttgacaagaggctttcggttgtgaagtcgtttaaagcgcagaatcaagctggagattttgatcatactcggtggttgtttgagactaaaggtacttatgggtatgggaacgctgtttggcctaaagatgggtatggaatcgggtcgggtggtggtggaaacgggtatgaaacgccacctgagtttggggagagaagcaagaggcctcttactaggaaagtcagtgtctctgctgcaattatcagtccttacagattactcattgcactgcgtctggtggctcttggtttgttcctgacatggagggttcgccacccaaaccgagaagcaatgtggttgtggggaatgtcaacgacctgtgagctttggtttgccttgtcttggcttttggatcagcttccaaaactctgtccggttaacagattaactgatttaggtgttcttaaagaacgctttgagtctccaaacctcaggaaccccaaaggaagatctgatcttccgggtatcgatgtgtttgtctcaactgcagaccctgagaaagaaccacctctggtcacagccaacaccattctctcgatccttgctgttgattaccctgtggagaaacttgcttgctacttgtcagacgatggaggagctttgctaacatttgaagccttggctcaaacagctagctttgcaagtacatgggtgccattttgcaggaaacacaatatagagccaaggaaccctgaggcctactttggacagaagcgtaactttctcaagaacaaagtcaggctggattttgtgagggaaaggaggagagtgaagagagaatatgatgagtttaaggtcagaatcaactcattgcctgaagcgataaggagaaggtctgatgcttataacgtgcacgaagagctaagggctaagaagaaacagatggaaatgatgatgggaaacaatccacaagaaactgttatagttccaaaggccacttggatgtcagatggttctcactggccagggacttggtcctctggagaaaccgataactctcgaggagatcatgctggaatcattcaggcaatgttggctcctccaaatgcagaaccagtttatggagctgaagcagatgctgagaacttaattgatacaacagacgttgacatcaggctaccaatgctggtctatgtgtcgagagagaagcgtccgggttatgaccacaacaagaaagcaggagccatgaatgctttggttagaaccagcgcaattatgtctaatggcccattcatcctcaatcttgattgtgaccactacatctacaactctatggctttgagagaaggaatgtgcttcatgcttgatcgtggtggcgatagaatctgctatgttcagttccctcagaggtttgaaggtattgacccaaatgatcgttatgcaaaccacaacactgtcttctttgatgttagtatgagagctttggatggacttcaaggtccaatgtatgtgggaactggctgcatctttcggagaacagctctttatggatttagcccgccaagagcaactgaacatcatggctggcttggaagaagaaaagtcaagatatcgctgaggagaccaaaagccatgatgaagaaagacgatgaagtttctttgcctataaatggagaatacaacgaagaagagaatgatgatggagatattgaatctctgcttctcccaaagagatttggtaactcaaactctttcgttgcttcaatcccagttgctgaataccaagggagactcatacaagacttgcaaggcaaaggcaagaacagtagaccagctggctcacttgctgtcccacgtgaaccacttgatgcagccactgtagctgaagcaatcagtgtgatatcttgcttctatgaggacaaaactgaatggggtaaaagagttggatggatctatggatcagtgactgaagatgtagtcacgggatatcgaatgcacaacagaggatggagatcaatctactgcgtgacaaaaagagacgctttccgtggaacagctccgatcaatctaacggatagacttcaccaggttctgagatgggcaacaggatctgttgagatcttcttctcaaggaacaatgcaatttttgcaaccagaaggatgaagtttttgcagagagtggcttacttcaacgttggaatgtatccattcacatcgctattcctcatcgtctactgcattctccctgcgatttcgctcttctcgggtcaattcatagtccaatcactcgacataacgttcttgatctatctcctctcgataacactcacgctctgtatgctatcactccttgagatcaaatggtcaggcataactctccatgaatggtggagaaacgagcagttctgggtcataggaggtacaagcgcacaccctgcagctgttcttcagggtcttcttaaggtaattgcaggagttgatatctcatttaccttgacttccaagtcatctgcaccagaagatggagacgatgagtttgcggatctgtatgttgtgaaatggagctttttgatggttcctccattaactatcatgatggtgaatatgattgcaattgcggtggggctagcgaggactctgtacagtccgtttccacagtggagtaagcttgttggaggagtgttcttcagcttttgggtgctttgtcatctgtatccgtttgctaaaggattgatgggaagaagaggcagagttccgaccatagtgtttgtgtggtcaggtttgttgtcgattattgtgtcgttgctttgggtttatattaaccctccttcagggaaacaggactatatgcagtttcaattcccttga

SEQ ID NO: 32611 - protein, 1181 aa, Arabidopsis thaliana
  misc_feature (1)..(1181): Ceres Seq. ID no. 13593639
MVKSAASQSPSPVTITVTPCKGSGDRSLGLTSPIPRASVITNQNSPLSSRATRRTSISSGNRRSNGDEGRYCSMSVEDLTAETTNSECVLSYTVHIPPTPDHQTVFASQESEEDEMLKGNSNQKSFLSGTIFTGGFKSVTRGHVIDCSMDRADPEKKSGQICWLKGCDEKVVHGRCECGFRICRDCYFDCITSGGGNCPGCKEPYRDINDDPETEEEDEEDEAKPLPQMGESKLDKRLSVVKSFKAQNQAGDFDHTRWLFETKGTYGYGNAVWPKDGYGIGSGGGGNGYETPPEFGERSKRPLTRKVSVSAAIISPYRLLIALRLVALGLFLTWRVRHPNREAMWLWGMSTTCELWFALSWLLDQLPKLCPVNRLTDLGVLKERFESPNLRNPKGRSDLPGIDVFVSTADPEKEPPLVTANTILSILAVDYPVEKLACYLSDDGGALLTFEALAQTASFASTWVPFCRKHNIEPRNPEAYFGQKRNFLKNKVRLDFVRERRRVKREYDEFKVRINSLPEAIRRRSDAYNVHEELRAKKKQMEMMMGNNPQETVIVPKATWMSDGSHWPGTWSSGETDNSRGDHAGIIQAMLAPPNAEPVYGAEADAENLIDTTDVDIRLPMLVYVSREKRPGYDHNKKAGAMNALVRTSAIMSNGPFILNLDCDHYIYNSMALREGMCFMLDRGGDRICYVQFPQRFEGIDPNDRYANHNTVFFDVSMRALDGLQGPMYVGTGCIFRRTALYGFSPPRATEHHGWLGRRKVKISLRRPKAMMKKDDEVSLPINGEYNEEENDDGDIESLLLPKRFGNSNSFVASIPVAEYQGRLIQDLQGKGKNSRPAGSLAVPREPLDAATVAEAISVISCFYEDKTEWGKRVGWIYGSVTEDVVTGYRMHNRGWRSIYCVTKRDAFRGTAPINLTDRLHQVLRWATGSVEIFFSRNNAIFATRRMKFLQRVAYFNVGMYPFTSLFLIVYCILPAISLFSGQFIVQSLDITFLIYLLSITLTLCMLSLLEIKWSGITLHEWWRNEQFWVIGGTSAHPAAVLQGLLKVIAGVDISFTLTSKSSAPEDGDDEFADLYVVKWSFLMVPPLTIMMVNMIAIAVGLARTLYSPFPQWSKLVGGVFFSFWVLCHLYPFAKGLMGRRGRVPTIVFVWSGLLSIIVSLLWVYINPPSGKQDYMQFQFP

SEQ ID NO: 32612 - protein, 1108 aa, Arabidopsis thaliana
  misc_feature (1)..(1108): Ceres Seq. ID no. 13593640
MSVEDLTAETTNSECVLSYTVHIPPTPDHQTVFASQESEEDEMLKGNSNQKSFLSGTIFTGGFKSVTRGHVIDCSMDRADPEKKSGQICWLKGCDEKVVHGRCECGFRICRDCYFDCITSGGGNCPGCKEPYRDINDDPETEEEDEEDEAKPLPQMGESKLDKRLSVVKSFKAQNQAGDFDHTRWLFETKGTYGYGNAVWPKDGYGIGSGGGGNGYETPPEFGERSKRPLTRKVSVSAAIISPYRLLIALRLVALGLFLTWRVRHPNREAMWLWGMSTTCELWFALSWLLDQLPKLCPVNRLTDLGVLKERFESPNLRNPKGRSDLPGIDVFVSTADPEKEPPLVTANTILSILAVDYPVEKLACYLSDDGGALLTFEALAQTASFASTWVPFCRKHNIEPRNPEAYFGQKRNFLKNKVRLDFVRERRRVKREYDEFKVRINSLPEAIRRRSDAYNVHEELRAKKKQMEMMMGNNPQETVIVPKATWMSDGSHWPGTWSSGETDNSRGDHAGIIQAMLAPPNAEPVYGAEADAENLIDTTDVDIRLPMLVYVSREKRPGYDHNKKAGAMNALVRTSAIMSNGPFILNLDCDHYIYNSMALREGMCFMLDRGGDRICYVQFPQRFEGIDPNDRYANHNTVFFDVSMRALDGLQGPMYVGTGCIFRRTALYGFSPPRATEHHGWLGRRKVKISLRRPKAMMKKDDEVSLPINGEYNEEENDDGDIESLLLPKRFGNSNSFVASIPVAEYQGRLIQDLQGKGKNSRPAGSLAVPREPLDAATVAEAISVISCFYEDKTEWGKRVGWIYGSVTEDVVTGYRMHNRGWRSIYCVTKRDAFRGTAPINLTDRLHQVLRWATGSVEIFFSRNNAIFATRRMKFLQRVAYFNVGMYPFTSLFLIVYCILPAISLFSGQFIVQSLDITFLIYLLSITLTLCMLSLLEIKWSGITLHEWWRNEQFWVIGGTSAHPAAVLQGLLKVIAGVDISFTLTSKSSAPEDGDDEFADLYVVKWSFLMVPPLTIMMVNMIAIAVGLARTLYSPFPQWSKLVGGVFFSFWVLCHLYPFAKGLMGRRGRVPTIVFVWSGLLSIIVSLLWVYINPPSGKQDYMQFQFP

SEQ ID NO: 32613 - protein, 1066 aa, Arabidopsis thaliana
  misc_feature (1)..(1066): Ceres Seq. ID no. 13593641
MLKGNSNQKSFLSGTIFTGGFKSVTRGHVIDCSMDRADPEKKSGQICWLKGCDEKVVHGRCECGFRICRDCYFDCITSGGGNCPGCKEPYRDINDDPETEEEDEEDEAKPLPQMGESKLDKRLSVVKSFKAQNQAGDFDHTRWLFETKGTYGYGNAVWPKDGYGIGSGGGGNGYETPPEFGERSKRPLTRKVSVSAAIISPYRLLIALRLVALGLFLTWRVRHPNREAMWLWGMSTTCELWFALSWLLDQLPKLCPVNRLTDLGVLKERFESPNLRNPKGRSDLPGIDVFVSTADPEKEPPLVTANTILSILAVDYPVEKLACYLSDDGGALLTFEALAQTASFASTWVPFCRKHNIEPRNPEAYFGQKRNFLKNKVRLDFVRERRRVKREYDEFKVRINSLPEAIRRRSDAYNVHEELRAKKKQMEMMMGNNPQETVIVPKATWMSDGSHWPGTWSSGETDNSRGDHAGIIQAMLAPPNAEPVYGAEADAENLIDTTDVDIRLPMLVYVSREKRPGYDHNKKAGAMNALVRTSAIMSNGPFILNLDCDHYIYNSMALREGMCFMLDRGGDRICYVQFPQRFEGIDPNDRYANHNTVFFDVSMRALDGLQGPMYVGTGCIFRRTALYGFSPPRATEHHGWLGRRKVKISLRRPKAMMKKDDEVSLPINGEYNEEENDDGDIESLLLPKRFGNSNSFVASIPVAEYQGRLIQDLQGKGKNSRPAGSLAVPREPLDAATVAEAISVISCFYEDKTEWGKRVGWIYGSVTEDVVTGYRMHNRGWRSIYCVTKRDAFRGTAPINLTDRLHQVLRWATGSVEIFFSRNNAIFATRRMKFLQRVAYFNVGMYPFTSLFLIVYCILPAISLFSGQFIVQSLDITFLIYLLSITLTLCMLSLLEIKWSGITLHEWWRNEQFWVIGGTSAHPAAVLQGLLKVIAGVDISFTLTSKSSAPEDGDDEFADLYVVKWSFLMVPPLTIMMVNMIAIAVGLARTLYSPFPQWSKLVGGVFFSFWVLCHLYPFAKGLMGRRGRVPTIVFVWSGLLSIIVSLLWVYINPPSGKQDYMQFQFP

SEQ ID NO: 32614 - DNA, 959 bp, Arabidopsis thaliana
  misc_feature (1)..(959): Ceres Seq. ID no. 13593649
ggtgtttagcttcttcactaccacacagaaacagagtttccgtcyttcatcttcctccatatgcgycgctcttaaaaacctaattcacaatgtccgtcgttctcaacgccggcttcagttctccgcttcaaaacagatcacatcatgttatacagttaaagccttcgccttttgcgtcatacatatctctaaacagttcaagaaggtcactgttatgcaaaagaagattggttgtatcttgtttggatacaaatgacaattctgtcacaactacatccgtagattcttcttcttcttcagattctaataaaccagtaagtgaatcagttgaatcaagcaatggcactgccaaaaaagcaccattgacagcacgagagagactaagagcggctcgtgttcttagccgatacactgaagcaacaccgaaaccatcaaaacccaaaatgggaagccagcttcttgatgttctcaaggaaagtgataagaaatcaaagaggaaaccgggtctacccgaagcaccaactaacatgcttgatgatagcaggagggggatgccaaagagtggcctaacgtttgatttaccgggaggctcggatattctcatcattgctttctcctttgtgttcataagcacagtcatgtttgctactacttttcttgtttggaaactaggtgcgatacacttcaacgaataggtaaagttgagatctggagaagattaatggagtttggaaaccaatcaagcagggaacgagagagagtgttttgttacaatgttagttaacaatgcatacttggggatgtgatggggatgttcatcacttggcaaagccggtttgagtgtatatacatatactatgtagtacacataattttgctatgaactctcttcatgcttgatttgtaattttaatcttttgcattgtaatttcttwtcatatggaaatggatrcttaaag

SEQ ID NO: 32615 - protein, 201 aa, Arabidopsis thaliana
  misc_feature (1)..(201): Ceres Seq. ID no. 15221228
MSVVLNAGFSSPLQNRSHHVIQLKPSPFASYISLNSSRRSLLCKRRLVVSCLDTNDNSVTTTSVDSSSSSDSNKPVSESVESSNGTAKKAPLTARERLRAARVLSRYTEATPKPSKPKMGSQLLDVLKESDKKSKRKPGLPEAPTNMLDDSRRGMPKSGLTFDLPGGSDILIIAFSFVFISTVMFATTFLVWKLGAIHFNE

SEQ ID NO: 32616 - DNA, 1632 bp, Arabidopsis thaliana
  misc_feature (1)..(1632): Ceres Seq. ID no. 13593661
ctctctctcttctttctctttgtcatgaaccagtaatcttgtttctcttcatcttccattgacgtttccttctatcctcgttgccttcatttttcactcgcacgctaatcttcgcctactttgttagattttcggttttgggtttttgtcttttggtcgatttcccctgttcccagaatctccgattaagctgcttccttaatctcttgtctgaatataaactttttccggcgtgtaatttagataggtggttaaaattacgagtagtgagaggagtgttgttgctgttttgtttattcggtaaaacgaaatcggaagttctttgttgtcgtttgattccttttgagaaagagagatgttgggagctggatttaacttcactcagcttcagagagctcaaattgacgtctcttatggctgcagatcgagtcacactaaggatcgtgagaacggctctgcattgttgaaacaccatgtttctgaggcatcgtcaagtaatgtggaacggtttttggattcggtgacaccatctgttccggctcactatttatctaagacaatagttagggaaagaggaggcagtgatgttgagtctcaagttccttattttcttcttggagatgtatgggaatcgtttgcagagtggagtgcttatggcattggagttcctctcactttgaataacaataaagatcgtgtctttcaatactacgtgccctcgctttctggtattcaagtatacgctgatgttgatgctttaacttcatctcttcaagcaaggcggcaaggtgaggagagcgaaagcgattttagggattcaagtagtgaaggaagcagtagtgaatctgaaagaggactctgttattcaaaagagcagatctccgctagaatggacaaactctccttaagaaaggagcatcaagaagattcgtctagtgatgatggcgagcctttaagctctcaaggtcgtttgatatttgagtatcttgaacgtgatcttccttacgtccgtgaaccctttgccgacaagatgtctgaccttgcctctagatttcccgagctgaagacgctaagaagctgtgatttgcttccttcaagctggttttctgtggcatggtacccaatttacaaaatacccacaggaccgacactcaaggatctggatgcttgtttcttgacctatcattcccttcacacaccctttcaaggtccaggcgttacaacagggtctatgcatgtggtgcagccaagggaaagtgttgagaagatggaactgcctgtctttggtctcgcctcatacaagttgagaggttctgtatggacaagctttggtggctcgggccaccagctcgcgaactctctcttccaagccgcagataattggctgaggttgcgtcaagtcaaccatcctgatttcatcttcttctgccgccggtaatgatagattatactatgatgacgaaaaatgatataggaagttataaaaaggaactctttatgattactgtcttgaggaaaccttacatataggatactgtcaaaagtttttcatttggtagcttctgtaaattcacagaatgctagttttcttattgtgtgtaaaactgtttttgcaataaaggctaatagttg

SEQ ID NO: 32617 - protein, 360 aa, Arabidopsis thaliana
  misc_feature (1)..(360): Ceres Seq. ID no. 13593662
MLGAGFNFTQLQRAQIDVSYGCRSSHTKDRENGSALLKHHVSEASSSNVERFLDSVTPSVPAHYLSKTIVRERGGSDVESQVPYFLLGDVWESFAEWSAYGIGVPLTLNNNKDRVFQYYVPSLSGIQVYADVDALTSSLQARRQGEESESDFRDSSSEGSSSESERGLCYSKEQISARMDKLSLRKEHQEDSSSDDGEPLSSQGRLIFEYLERDLPYVREPFADKMSDLASRFPELKTLRSCDLLPSSWFSVAWYPIYKIPTGPTLKDLDACFLTYHSLHTPFQGPGVTTGSMHVVQPRESVEKMELPVFGLASYKLRGSVWTSFGGSGHQLANSLFQAADNWLRLRQVNHPDFIFFCRR

SEQ ID NO: 32618 - protein, 182 aa, Arabidopsis thaliana
  misc_feature (1)..(182): Ceres Seq. ID no. 13593663
MDKLSLRKEHQEDSSSDDGEPLSSQGRLIFEYLERDLPYVREPFADKMSDLASRFPELKTLRSCDLLPSSWFSVAWYPIYKIPTGPTLKDLDACFLTYHSLHTPFQGPGVTTGSMHVVQPRESVEKMELPVFGLASYKLRGSVWTSFGGSGHQLANSLFQAADNWLRLRQVNHPDFIFFCRR

SEQ ID NO: 32619 - DNA, 1069 bp, Arabidopsis thaliana
  misc_feature (1)..(1069): Ceres Seq. ID no. 13593680
ggtgaagccaaaggcatcgtgagcaaaatccgcagttttctacattaatggattgtttctgttctagagcttctcttccgtctctgtgatttctgggtagattctaggatttctatttgcatctctaacctgagagctgctaatagtccacacaactttttagtttgtgagttttcctaatttagggttaggacaaatttctgtatttttcatccaaggggataaagatgtatgctgataaattggaggctgagtctggaagcaggaaggtcgttaaggatcgtatcaatggcggttctggagacatctctactcgcgtgcgacaagtgactgggaagaggcaaaggcaggacgacaaatgggagcatgatcttttcagtagtgacaaacctcaactttcaaatcgcagggttgatcctagagatcttcgtttgaagctccaaaagagacatcatgggtctcaaagtgggcgagaagctggttcaggcgtgcgggatttacgggatcagctctctgggacaatgaatcagcaaccaaaaaacagtgacccaccaaaatccaaagcggaggctgctaggccaagtatgaagagcgtagcgactgaaacagagactagaaaaacttccagtcaagctaccaggaagaaatcacagcaggctgattcatcggttgatagctttcttgaatcattgggtctcgagaaatattcaacagcgtttcaagtggaagaagttgatatggatgctctcatgcatatgacagatgatgacctcaaggctatgctcataccgatgggtccgaggaagaagatacttcttgctttgggatctaaaccctaagagcttagtgccatctacctgatggttggaagctcaggtgaatggtctctggagttgttacattaagaattgtcagaaatgaattggctctttttctcttgattgtattttgcccattttaagagcttagaatttggttagacatctgtaatcgtaaacatggtgaaacatacactgtttgattgcaccacttttgatgtgagagaagccttaagataaacacaacaacg

SEQ ID NO: 32620 - protein, 203 aa, Arabidopsis thaliana
  misc_feature (1)..(203): Ceres Seq. ID no. 13593681
MYADKLEAESGSRKVVKDRINGGSGDISTRVRQVTGKRQRQDDKWEHDLFSSDKPQLSNRRVDPRDLRLKLQKRHHGSQSGREAGSGVRDLRDQLSGTMNQQPKNSDPPKSKAEAARPSMKSVATETETRKTSSQATRKKSQQADSSVDSFLESLGLEKYSTAFQVEEVDMDALMHMTDDDLKAMLIPMGPRKKILLALGSKP

SEQ ID NO: 32621 - protein, 105 aa, Arabidopsis thaliana
  misc_feature (1)..(105): Ceres Seq. ID no. 13593682
MNQQPKNSDPPKSKAEAARPSMKSVATETETRKTSSQATRKKSQQADSSVDSFLESLGLEKYSTAFQVEEVDMDALMHMTDDDLKAMLIPMGPRKKILLALGSKP

SEQ ID NO: 32622 - DNA, 1499 bp, Arabidopsis thaliana
  misc_feature (1)..(1499): Ceres Seq. ID no. 13593683
gatctaccttctcagaaagggagctgcatcaatggcgaccaataatgattttggagctttcattgagaaagttacaatctctccaacttctacttcctcgtcgcctccttctctacagggtcttactttcgccattaaagacatttttgatgtggaaggacgcgttaccggttttggtaacccggattggttaaggacacactcggcagctacttctacagctccagtagtttcatctctcttagaagctggtgccacagctttgggtattaccattatggatgaaatggcttacagtataaacggagaaaatgcgcattatgggactccgagaaacccgattgctttcgatagagtgcctgggggatcatcgagtggctcagccgtagctgtagctgctcgtcttgtggatttttctattggaactgataccggagggagtgtacgagttccagcatcttactgtgggattttcggtttccggccatcccacggtgcagtttccactgtcggacttactccaatggctcagagcttcgacacagttggatggtttgctcgggacacagccactttgaaacgtgtaggttgcgttctcctgcagcagcatcacttgaaccccatcgaaccatctcaactgattatcgcggatgactgcttcaagctgtgtagtgtaccgcatgatctcttggtgcagcctctggttggatccgtggaaaaatcgtttggaggcaacactgtagtaaagaaggtgaatcttggagagtacattggacagaatgttccaagccttaaacatttcatgacaagtgacgatgtcactacacaacaagagttctgcattccgtctctcatggccctatcgagttcaatgagattgttacaaagacatgaattcaagataaaccacggtgcatggatctcgtcggtgaagccagagtttggtcctggaatatcagaacgaattgaggaagctatcagaacatccgacgagaagatcgaccattgccggtccgtgaaatctgaactgataacggctctttcaactttgctcggggagaagggtgtgttggtgattccaacggtaccaggtcctccaccgcatctccaagctaatgtggctgcacttgaatctttccgcagcagagccttcagcttgttgtcgatcgcaggcgtttctggattctgtcaggtgagcataccattggggctacacgaaaatcttccggtttcggtatcattggtagctaagtatggctcagacggttttcttctgagtcttgtggattcccttgctgcatttatttgattgacatgtcataaacttaatgcactttgagcatatctattttgctttctgtttattatgtcatcgtagcatatctgaatggttttcttgtcccaaacccaacaatgtattaaataaattgttgtatatgttggacaattgtactatttgtcttttagcgaagtattaatgacaacttaatattaactag

SEQ ID NO: 32623 - protein, 435 aa, Arabidopsis thaliana
  misc_feature (1)..(435): Ceres Seq. ID no. 13593684
IYLLRKGAASMATNNDFGAFIEKVTISPTSTSSSPPSLQGLTFAIKDIFDVEGRVTGFGNPDWLRTHSAATSTAPVVSSLLEAGATALGITIMDEMAYSINGENAHYGTPRNPIAFDRVPGGSSSGSAVAVAARLVDFSIGTDTGGSVRVPASYCGIFGFRPSHGAVSTVGLTPMAQSFDTVGWFARDTATLKRVGCVLLQQHHLNPIEPSQLIIADDCFKLCSVPHDLLVQPLVGSVEKSFGGNTVVKKVNLGEYIGQNVPSLKHFMTSDDVTTQQEFCIPSLMALSSSMRLLQRHEFKINHGAWISSVKPEFGPGISERIEEAIRTSDEKIDHCRSVKSELITALSTLLGEKGVLVIPTVPGPPPHLQANVAALESFRSRAFSLLSIAGVSGFCQVSIPLGLHENLPVSVSLVAKYGSDGFLLSLVDSLAAFI

SEQ ID NO: 32624 - protein, 425 aa, Arabidopsis thaliana
  misc_feature (1)..(425): Ceres Seq. ID no. 13593685
MATNNDFGAFIEKVTISPTSTSSSPPSLQGLTFAIKDIFDVEGRVTGFGNPDWLRTHSAATSTAPVVSSLLEAGATALGITIMDEMAYSINGENAHYGTPRNPIAFDRVPGGSSSGSAVAVAARLVDFSIGTDTGGSVRVPASYCGIFGFRPSHGAVSTVGLTPMAQSFDTVGWFARDTATLKRVGCVLLQQHHLNPIEPSQLIIADDCFKLCSVPHDLLVQPLVGSVEKSFGGNTVVKKVNLGEYIGQNVPSLKHFMTSDDVTTQQEFCIPSLMALSSSMRLLQRHEFKINHGAWISSVKPEFGPGISERIEEAIRTSDEKIDHCRSVKSELITALSTLLGEKGVLVIPTVPGPPPHLQANVAALESFRSRAFSLLSIAGVSGFCQVSIPLGLHENLPVSVSLVAKYGSDGFLLSLVDSLAAFI

SEQ ID NO: 32625 - protein, 343 aa, Arabidopsis thaliana
  misc_feature (1)..(343): Ceres Seq. ID no. 13593686
MDEMAYSINGENAHYGTPRNPIAFDRVPGGSSSGSAVAVAARLVDFSIGTDTGGSVRVPASYCGIFGFRPSHGAVSTVGLTPMAQSFDTVGWFARDTATLKRVGCVLLQQHHLNPIEPSQLIIADDCFKLCSVPHDLLVQPLVGSVEKSFGGNTVVKKVNLGEYIGQNVPSLKHFMTSDDVTTQQEFCIPSLMALSSSMRLLQRHEFKINHGAWISSVKPEFGPGISERIEEAIRTSDEKIDHCRSVKSELITALSTLLGEKGVLVIPTVPGPPPHLQANVAALESFRSRAFSLLSIAGVSGFCQVSIPLGLHENLPVSVSLVAKYGSDGFLLSLVDSLAAFI

SEQ ID NO: 32626 - DNA, 1161 bp, Arabidopsis thaliana
  misc_feature (1)..(1161): Ceres Seq. ID no. 13593693
atgaaaatcaattgcttgttctgttgtatgtcccacagacgatttaacagacgatcatcatcgagacaaagcatcaaagactgcattgatgcaaagaacaatataactacatttgacaacatctcttttaaaacagatagcagtaggcgaagatacatatccgaggagatagcaaaactcggtaaagggaacatcagtgctcatatttttacattcagagagctttgcgtcgctaccaagaacttcaaccccgataatcagctcggtgaaggcgggtttggaagggtttacaaagggcagatagaaaccccggaacaagttgttgcggttaagcagctagacaggaatggttaccaagggaacagagagtttcttgtggaagtcatgatgttgagtctcttacatcatcaaaaccttgtcaatttggtcggatattgcgcagacggtgatcaacggattcttgtctatgaatacatgcaaaatggctctttagaggatcatcttctagaattggcgcggaacaagaagaagccgttggattgggacacaagaatgaaagttgcggcaggagcagctagagggcttgagtatctacacgaaacagcagatcctcctgttatctacagagacttcaaggcctcaaatatattacttgacgaagaattcaacccaaagctttcggatttcggtttagctaaggttggtccgaccggtggagagactcatgtgtcaacgagagtgatgggaacatacggctattgtgcgcctgagtatgctctcacaggacagctcactgtgaaatccgatgtatacagcttcggagtcgtgttcttggagatgatcacaggaagacgagtcattgacacaacaaaaccaactgaagaacagaacttagtcacttgggcgagtccattgttcaaagataggagaaagttcacgttaatggcagatccattgcttgaaggaaagtatccaataaaaggattgtatcaagcgcttgcagtagcagcaatgtgtcttcaagaagaagcagcaacgagaccaatgatgagtgatgtagtcactgcgcttgagtacttagccgtgaccaaaaccgaagaagatggacaaactgtagaaggagaagaagaagaagaagaagacgaaagatccaaactttga

SEQ ID NO: 32627 - protein, 386 aa, Arabidopsis thaliana
  misc_feature (1)..(386): Ceres Seq. ID no. 13593694
MKINCLFCCMSHRRFNRRSSSRQSIKDCIDAKNNITTFDNISFKTDSSRRRYISEEIAKLGKGNISAHIFTFRELCVATKNFNPDNQLGEGGFGRVYKGQIETPEQVVAVKQLDRNGYQGNREFLVEVMMLSLLHHQNLVNLVGYCADGDQRILVYEYMQNGSLEDHLLELARNKKKPLDWDTRMKVAAGAARGLEYLHETADPPVIYRDFKASNILLDEEFNPKLSDFGLAKVGPTGGETHVSTRVMGTYGYCAPEYALTGQLTVKSDVYSFGVVFLEMITGRRVIDTTKPTEEQNLVTWASPLFKDRRKFTLMADPLLEGKYPIKGLYQALAVAAMCLQEEAATRPMMSDVVTALEYLAVTKTEEDGQTVEGEEEEEEDERSKL

SEQ ID NO: 32628 - protein, 377 aa, Arabidopsis thaliana
  misc_feature (1)..(377): Ceres Seq. ID no. 13593695
MSHRRFNRRSSSRQSIKDCIDAKNNITTFDNISFKTDSSRRRYISEEIAKLGKGNISAHIFTFRELCVATKNFNPDNQLGEGGFGRVYKGQIETPEQVVAVKQLDRNGYQGNREFLVEVMMLSLLHHQNLVNLVGYCADGDQRILVYEYMQNGSLEDHLLELARNKKKPLDWDTRMKVAAGAARGLEYLHETADPPVIYRDFKASNILLDEEFNPKLSDFGLAKVGPTGGETHVSTRVMGTYGYCAPEYALTGQLTVKSDVYSFGVVFLEMITGRRVIDTTKPTEEQNLVTWASPLFKDRRKFTLMADPLLEGKYPIKGLYQALAVAAMCLQEEAATRPMMSDVVTALEYLAVTKTEEDGQTVEGEEEEEEDERSKL

SEQ ID NO: 32629 - protein, 258 aa, Arabidopsis thaliana
  misc_feature (1)..(258): Ceres Seq. ID no. 13593696
MMLSLLHHQNLVNLVGYCADGDQRILVYEYMQNGSLEDHLLELARNKKKPLDWDTRMKVAAGAARGLEYLHETADPPVIYRDFKASNILLDEEFNPKLSDFGLAKVGPTGGETHVSTRVMGTYGYCAPEYALTGQLTVKSDVYSFGVVFLEMITGRRVIDTTKPTEEQNLVTWASPLFKDRRKFTLMADPLLEGKYPIKGLYQALAVAAMCLQEEAATRPMMSDVVTALEYLAVTKTEEDGQTVEGEEEEEEDERSKL

SEQ ID NO: 32630 - DNA, 3240 bp, Arabidopsis thaliana
  misc_feature (1)..(3240): Ceres Seq. ID no. 13593697
gtgtgttctgccaaagtttctctgcagcttctcctcttctcagaaattagggttccgtctcaaattacgagcagatctcgtactctctgatgtctgaagatccggagtaccgttgcttcattggtgggcttgcttggacaacgtctgatcgtggtctcagagatgcctttgagaagtatggtcacctcgttgaggccaaggtggttcttgacaagttttctggtcgctcccgtggttttggattcatcactttcgatgagaaaaaagctatggatgaagctattgcagcaatgaatggaatggatttggatgggcgaactatcactgttgataaagctcagcctcatcagggtggtgcaggcagagataatgatggtgaccgtggtcgagaccgtggatatgatcgtgatcgcagtcgtccctctggtgggcgaggtggtggagattgctttaaatgtggcaagcctggacattttgcaagagagtgtccttctgaaagtagtagagatggtggtggaaggttcagctcaaaggatgataggtacagttcgaaggacgataggtatggtgcaaaagatgataggtatggtgcaaaggaggataggtatggtgcaaaggatgataggtacagctccaaggatgataggtacagctccaaggatgataggtatggtagtagggatggtggaggtagtcgctatggacctgatcgcagtggtgaacgcgctggaggacgcagccgggatggtggcagccgtggagctccaggaggtgagaggcacagtcgtgctccatatgaccgccccagagctggtggtttccactagaattctactccaaaggttaaagaagttgaaggtttctgctttcagctcgtgtcaagtcaaagttacgcttgatggtctattttcttcaatgtatttggatagctcgagaaagaagatgtgttctctattttggccctaaactcaagagtcgactatgttcctaaagtgctctctctccttttgatatgttgatccctatggaaaccttgtgcttggttggtttgagacaatttgagatgtgctactttatgcttatcgtaatgaatgcgtgggttatcccccaacaccaaatatgcaaaagcctcaggatggtctgatactcgggtttagccgtgaaaattaaagactgatctataaaacttgtgatgggattgggaaatatacattgctgattgatacttggctactggaactcaaacatcccttcatgagcaacaaattgtcattttcaggaaaaagattgactttgtgcaattttagatcttggcaagtcaaatccaatagttttcttcaactagggaaatttctacagccaaatggtctctggttggctcgtctagtatagctcactgggtttatcttcgatctattctttgtgggttcttcgtgcctcttcgtctactttgtttcttgctcgtgacctctacctctgcctttgattctcaagctctaaactccaggaattgggaaatggtgttaatgtatatatagttaatatacgcttgaataggtatccttactttgataatttgttgaaattgcatacataaataggtcacacgagttatgtcgggaaaacactgacttgattattttatacaagtgaatagtatatgtatggttagaacttagatgcatgactagttcgttcaccttctttcacaattttgtattgcatacatacatacattgcttaggtgaatatataatcaatttaccataaataaatgactttgtaagtctcataatttaagactttgtttctaacataaagaaagactttgtagaacatatgagttggtgtatagcttaaacgttgactcaattatttgatagaaatcgaatagcatagctattcgacgccactattcggttactcgtacctcgaccacaccaaattaagaacacttaccggaagaagataaaaggagaaaatggaaactaatctcttgttggtaaagtgtgtcttattagcatcatgtctcatacatccccgtgcttgctctccttcttgcaatttcccggcgatattcaacttcggcgactctaactccgacacaggtggcctttctgcctctttcggacaagccccttacccaaatggccaaaccttcttccactccccttccggtcgtttctcagatggtcgactcatcattgacttcatagcggaggagttaggtttaccatacctaaatgctttcttagactccatcggttcaaacttcagccatggtgccaatttcgccaccgctggctccaccgtccggccaccaaacgcaaccatcgctcagagcggtgtgagtccaatctctctcgacgttcaattggtccaattctccgatttcatcacacgatcacaactcattcgcaatcgaggtggagtgtttaagaaattgcttcccaagaaagagtatttctctcaagcattgtacacattcgacatcggtcagaacgatctcaccgctggactaaaacttaacatgacttcagatcaaatcaaggcttatataccagatgttcatgatcagctctctaacgtcattcgtaaggtgtatagtaaaggaggaagaagattttggatacacaacacagctccacttggttgtttaccttatgttttagaccggttcccagtaccggcttctcaaatcgacaatcacggttgtgcaattccgcgtaatgagattgctcgatactataactctgaacttaaaagaagagtgattgagttgagaaaagagctctctgaagctgcgtttacttatgttgatatctactctatcaagcttactctcatcactcaagccaagaaactcggttttaggtatcctttggtggcttgttgtggacatggtgggaagtacaatttcaacaagcttattaaatgtggagctaaagttatgatcaaagggaaagagattgtgcttgctaagtcttgtaacgatgtgtcgtttagagttagctgggacggtatacatttcactgaaacgacaaacagttggatctttcagcaaataaacgacggggcgttttcggatcctcctcttcctgtgaagtctgcctgcaccagatagaagaacttagggaatcatatgaccaaagtgtccttgaaaatggggacaaataaaagttctttggaatatttgttttttgtcaagttctaagaaaattctcatgaaagtgaaatcat

SEQ ID NO: 32631 - protein, 380 aa, Arabidopsis thaliana
  misc_feature (1)..(380): Ceres Seq. ID no. 15221229
METNLLLVKCVLLASCLIHPRACSPSCNFPAIFNFGDSNSDTGGLSASFGQAPYPNGQTFFHSPSGRFSDGRLIIDFIAEELGLPYLNAFLDSIGSNFSHGANFATAGSTVRPPNATIAQSGVSPISLDVQLVQFSDFITRSQLIRNRGGVFKKLLPKKEYFSQALYTFDIGQNDLTAGLKLNMTSDQIKAYIPDVHDQLSNVIRKVYSKGGRRFWIHNTAPLGCLPYVLDRFPVPASQIDNHGCAIPRNEIARYYNSELKRRVIELRKELSEAAFTYVDIYSIKLTLITQAKKLGFRYPLVACCGHGGKYNFNKLIKCGAKVMIKGKEIVLAKSCNDVSFRVSWDGIHFTETTNSWIFQQINDGAFSDPPLPVKSACTR

SEQ ID NO: 32632 - protein, 245 aa, Arabidopsis thaliana
  misc_feature (1)..(245): Ceres Seq. ID no. 15221230
MSEDPEYRCFIGGLAWTTSDRGLRDAFEKYGHLVEAKVVLDKFSGRSRGFGFITFDEKKAMDEAIAAMNGMDLDGRTITVDKAQPHQGGAGRDNDGDRGRDRGYDRDRSRPSGGRGGGDCFKCGKPGHFARECPSESSRDGGGRFSSKDDRYSSKDDRYGAKDDRYGAKEDRYGAKDDRYSSKDDRYSSKDDRYGSRDGGGSRYGPDRSGERAGGRSRDGGSRGAPGGERHSRAPYDRPRAGGFH

SEQ ID NO: 32633 - protein, 223 aa, Arabidopsis thaliana
  misc_feature (1)..(223): Ceres Seq. ID no. 15221231
MEWIWMGELSLLIKLSLIRVVQAEIMMVTVVETVDMIVIAVVPLVGEVVEIALNVASLDILQESVLLKVVEMVVEGSAQRMIGTVRRTIGMVQKMIGMVQRRIGMVQRMIGTAPRMIGTAPRMIGMVVGMVEVVAMDLIAVVNALEDAAGMVAAVELQEVRGTVVLHMTAPELVVSTRILLQRLKKLKVSAFSSCQVKVTLDGLFSSMYLDSSRKKMCSLFWP

SEQ ID NO: 32634 - DNA, 1965 bp, Arabidopsis thaliana
  misc_feature (1)..(1965): Ceres Seq. ID no. 13593698
gaagtgaactccattgacgacgagtgaacgaaaggagggaagaaaaaagttaggttcgaaacgaaagtaaactagttaggtgaaaagcgaaacaacacccacagagcaatggcccctgctctcgccgttacacgagatctcaccgccgtcggatctccggagaatgctcctgcgaaaggacgtgcttcggtttacagtgaagttcaatcaagccgtattaacaacactcttcctttgccttctgttctcaaaggagctttcaaaatcgtcgaaggtcccgctagttccgccgccgggaatccagatgagatagcgaagttgtttccgggtctatatggccagccatcagtagcagtggttccagatcaggatgcaccttcgtcggcaccgaaattgaagattggtgttgttttgtctggaggtcaggcacctggtgggcacaatgttatttctggactgtttgattacctgcaagagcgtgcgaaaggtagcacattttacgggttcaagggtggtccagctggtatcatgaaatgcaaatatgttgagttgaatgctgaatatattcagccttacagaaaccagggtggttttgacatgatctgcagtggaagagacaagattgaaacacctgaccagtttaaacaagctgaagaaacagcaaagaagcttgatttggatgggttggtggttatcggtggagatgattccaacaccaatgcttgccttcttgctgaaaacttcaggagtaagaacttgaaaacccgagtcattgggtgccccaagaccattgatggtgatttgaaatgcaaagaggttcctactagttttgggtttgatacagcttgcaagatttactctgaaatgatcggaaacgtcatgattgatgcaaggtcgactggaaagtactatcattttgtaagacttatgggtcgtgctgcttcccacattacgcttgagtgtgctttacaaactcacccaaacataaccattattggagaagaggtttctgcccagaagcagactttgaagaatgtcacagactacatggtggatgttatctgcaaacgtgctgaacttggttacaactacggtgtcatactgattccagaaggtctgatcgactttattcctgaggtccaagagctcattgctgaactgaatgaaattctggcaaatgaggttgtcgatgaaaatggtttgtggaagaagaagctcaccgagcaatccctgaagctgtttgatcttctgcctgaagcaattcaggaacagctgatgcttgagagagacccacacggaaatgtccaggttgctaagattgagactgagaagatgcttattcaaatggttgaaactgaattggagaaaagaaagcaagctggtgcatacaagggacaattcatgggacagtcacatttcttcgggtatgaaggaagatgcggcttgcccacaaattttgatgccacatactgttatgcacttggttatggcgctggagtactcctcaacagtgggaagaccggactaatttcttcggttgggaacttggctgctcctgtggaagaatggactgtaggtgggactgctctcacagccttgatggatgtcgagaggagacacggtaagttcaagcctgtgatcaagaaagcaatggtggaacttgaaggtgcaccatttaagaaattcgcatcactgcgtgaagaatgggcattgaagaaccgatacatcagcccaggtccgatccaattcactggacctggttcagactctctcagccacactctacttcttgaactcggggctcaatagtctctcgactaaccaccattcctttgcttttctgccttccttggaatttcgcatcagtcttgttttatcttgaatattacgtgtccgtaacatttcgattaagttgattcctctcgtgtttcttcaacatataagataattataatattatttctc

SEQ ID NO: 32635 - protein, 566 aa, Arabidopsis thaliana
  misc_feature (1)..(566): Ceres Seq. ID no. 13593699
MAPALAVTRDLTAVGSPENAPAKGRASVYSEVQSSRINNTLPLPSVLKGAFKIVEGPASSAAGNPDEIAKLFPGLYGQPSVAVVPDQDAPSSAPKLKIGVVLSGGQAPGGHNVISGLFDYLQERAKGSTFYGFKGGPAGIMKCKYVELNAEYIQPYRNQGGFDMICSGRDKIETPDQFKQAEETAKKLDLDGLVVIGGDDSNTNACLLAENFRSKNLKTRVIGCPKTIDGDLKCKEVPTSFGFDTACKIYSEMIGNVMIDARSTGKYYHFVRLMGRAASHITLECALQTHPNITIIGEEVSAQKQTLKNVTDYMVDVICKRAELGYNYGVILIPEGLIDFIPEVQELIAELNEILANEVVDENGLWKKKLTEQSLKLFDLLPEAIQEQLMLERDPHGNVQVAKIETEKMLIQMVETELEKRKQAGAYKGQFMGQSHFFGYEGRCGLPTNFDATYCYALGYGAGVLLNSGKTGLISSVGNLAAPVEEWTVGGTALTALMDVERRHGKFKPVIKKAMVELEGAPFKKFASLREEWALKNRYISPGPIQFTGPGSDSLSHTLLLELGAQ

SEQ ID NO: 32636 - protein, 426 aa, Arabidopsis thaliana
  misc_feature (1)..(426): Ceres Seq. ID no. 13593700
MKCKYVELNAEYIQPYRNQGGFDMICSGRDKIETPDQFKQAEETAKKLDLDGLVVIGGDDSNTNACLLAENFRSKNLKTRVIGCPKTIDGDLKCKEVPTSFGFDTACKIYSEMIGNVMIDARSTGKYYHFVRLMGRAASHITLECALQTHPNITIIGEEVSAQKQTLKNVTDYMVDVICKRAELGYNYGVILIPEGLIDFIPEVQELIAELNEILANEVVDENGLWKKKLTEQSLKLFDLLPEAIQEQLMLERDPHGNVQVAKIETEKMLIQMVETELEKRKQAGAYKGQFMGQSHFFGYEGRCGLPTNFDATYCYALGYGAGVLLNSGKTGLISSVGNLAAPVEEWTVGGTALTALMDVERRHGKFKPVIKKAMVELEGAPFKKFASLREEWALKNRYISPGPIQFTGPGSDSLSHTLLLELGAQ

SEQ ID NO: 32637 - protein, 403 aa, Arabidopsis thaliana
  misc_feature (1)..(403): Ceres Seq. ID no. 13593701
MICSGRDKIETPDQFKQAEETAKKLDLDGLVVIGGDDSNTNACLLAENFRSKNLKTRVIGCPKTIDGDLKCKEVPTSFGFDTACKIYSEMIGNVMIDARSTGKYYHFVRLMGRAASHITLECALQTHPNITIIGEEVSAQKQTLKNVTDYMVDVICKRAELGYNYGVILIPEGLIDFIPEVQELIAELNEILANEVVDENGLWKKKLTEQSLKLFDLLPEAIQEQLMLERDPHGNVQVAKIETEKMLIQMVETELEKRKQAGAYKGQFMGQSHFFGYEGRCGLPTNFDATYCYALGYGAGVLLNSGKTGLISSVGNLAAPVEEWTVGGTALTALMDVERRHGKFKPVIKKAMVELEGAPFKKFASLREEWALKNRYISPGPIQFTGPGSDSLSHTLLLELGAQ

SEQ ID NO: 32638 - DNA, 1867 bp, Arabidopsis thaliana
  misc_feature (1)..(1867): Ceres Seq. ID no. 13593702
gacatcctcaagcgataacaccacaaacaaaacaacaaaccaaaaaaaaaaaaaagagagagagagagagcaaatctccatcatcatcatggactcgtctccaaacgacggcgtacaccaaccgcttctccatcctcaaccatctccatctccgccggagtcaaccaacggcgagctagaaactgtcctctccgacgtagaaactcctctgtttctccgcctacgtaaagccaccataatcgaatcaaagcttctctttaacctcgctgcaccagccgtcatcgtctacatgattaactacctcatgtccatgtctactcaaatcttctccggccatctcggtaacctcgaactcgccgccgcttctcttggtaacaccggtattcaagtcttcgcttacggtctcatgctaggcatggggagtgcagtggagacgttatgtggtcaagcgtacggtggtagaaaatacgagatgcttggagtttatctccaaagatcaaccgtattactaacactcaccggcctcctccttactttaatctacgttttctccgaaccaatccttctcttcctcggtgaatctcccgcaatcgcttcggccgcatcgctcttcgtctacggtcttatccctcaaatctttgcctacgcagcgaactttccaatacaaaaatttctccaatcacaaagcatagtagctccaagtgcttatatctcaacggctacgctctttgttcaccttcttttaagttggctcgcggtttacaagcttggtatgggacttcttggtgcgtcgcttgtgcttagcttgtcgtggtggattatagtcgtggctcagtttgtttatattgtgacgagtgagaggtgtcgtgagacgtggagaggttttagtgttcaagctttctcgggtttgtggagtttctttaaactctccgccgcttctgccgtgatgctttgccttgagacttggtattttcagattctcgttcttcttgccggacttctcgagaatcctgaacttgctcttgattcactctctatttgcatgacgatttcagggtgggtgttcatgatatctgttggattcaatgcagcgataagtgtaagagtgagcaatgaacttggagctgggaaccctaaatcagcagctttttctgtgatcatcgttaacatttattcgttaatcacttgtgtgatcctagccattgttattttagcgtgccgcgatgttttaagctatgctttcactgagggtaaagaagtctcggacgctgtttctgatctctgtccgcttcttgccgtaacacttgtccttaacggaatccaacctgtcctctctggtgtggcggttggatgcggttggcaaacgtttgtggcgaaggttaacgttggatgttactacattattggaattcctcttggggctctctttgggttttactttaacttcggtgccaagggtatatggacggggatgatcggtggtacggttatacaaacgtttattttggcgtgggtcacgtttagaacagattggacaaaagaagtggaagaagcttccaaaaggttggacaaatggagcaacaagaaacaagaagttgttcctgaatgatgcaggttgatgaaagtttggtatccaaggaaccgattagattcatcggtaaaccgatgcaaatgctcaaagtaacatgtgagctggtaaaaaaggatatggatcaaccttttaaacttctacaactcaattttaagttttttgtgttcttgtttaaaatgttagaggtaggttatgtatttttgtatgccaagattataatagttactgcgttattttttattgatttatatatatatgcatgtctttgattggatt

SEQ ID NO: 32639 - protein, 535 aa, Arabidopsis thaliana
  misc_feature (1)..(535): Ceres Seq. ID no. 15221232
TSSSDNTTNKTTNQKKKKEREREQISIIIMDSSPNDGVHQPLLHPQPSPSPPESTNGELETVLSDVETPLFLRLRKATIIESKLLFNLAAPAVIVYMINYLMSMSTQIFSGHLGNLELAAASLGNTGIQVFAYGLMLGMGSAVETLCGQAYGGRKYEMLGVYLQRSTVLLTLTGLLLTLIYVFSEPILLFLGESPAIASAASLFVYGLIPQIFAYAANFPIQKFLQSQSIVAPSAYISTATLFVHLLLSWLAVYKLGMGLLGASLVLSLSWWIIVVAQFVYIVTSERCRETWRGFSVQAFSGLWSFFKLSAASAVMLCLETWYFQILVLLAGLLENPELALDSLSICMTISGWVFMISVGFNAAISVRVSNELGAGNPKSAAFSVIIVNIYSLITCVILAIVILACRDVLSYAFTEGKEVSDAVSDLCPLLAVTLVLNGIQPVLSGVAVGCGWQTFVAKVNVGCYYIIGIPLGALFGFYFNFGAKGIWTGMIGGTVIQTFILAWVTFRTDWTKEVEEASKRLDKWSNKKQEVVPE

SEQ ID NO: 32640 - protein, 506 aa, Arabidopsis thaliana
  misc_feature (1)..(506): Ceres Seq. ID no. 15221233
MDSSPNDGVHQPLLHPQPSPSPPESTNGELETVLSDVETPLFLRLRKATIIESKLLFNLAAPAVIVYMINYLMSMSTQIFSGHLGNLELAAASLGNTGIQVFAYGLMLGMGSAVETLCGQAYGGRKYEMLGVYLQRSTVLLTLTGLLLTLIYVFSEPILLFLGESPAIASAASLFVYGLIPQIFAYAANFPIQKFLQSQSIVAPSAYISTATLFVHLLLSWLAVYKLGMGLLGASLVLSLSWWIIVVAQFVYIVTSERCRETWRGFSVQAFSGLWSFFKLSAASAVMLCLETWYFQILVLLAGLLENPELALDSLSICMTISGWVFMISVGFNAAISVRVSNELGAGNPKSAAFSVIIVNIYSLITCVILAIVILACRDVLSYAFTEGKEVSDAVSDLCPLLAVTLVLNGIQPVLSGVAVGCGWQTFVAKVNVGCYYIIGIPLGALFGFYFNFGAKGIWTGMIGGTVIQTFILAWVTFRTDWTKEVEEASKRLDKWSNKKQEVVPE

SEQ ID NO: 32641 - protein, 439 aa, Arabidopsis thaliana
  misc_feature (1)..(439): Ceres Seq. ID no. 15221234
MINYLMSMSTQIFSGHLGNLELAAASLGNTGIQVFAYGLMLGMGSAVETLCGQAYGGRKYEMLGVYLQRSTVLLTLTGLLLTLIYVFSEPILLFLGESPAIASAASLFVYGLIPQIFAYAANFPIQKFLQSQSIVAPSAYISTATLFVHLLLSWLAVYKLGMGLLGASLVLSLSWWIIVVAQFVYIVTSERCRETWRGFSVQAFSGLWSFFKLSAASAVMLCLETWYFQILVLLAGLLENPELALDSLSICMTISGWVFMISVGFNAAISVRVSNELGAGNPKSAAFSVIIVNIYSLITCVILAIVILACRDVLSYAFTEGKEVSDAVSDLCPLLAVTLVLNGIQPVLSGVAVGCGWQTFVAKVNVGCYYIIGIPLGALFGFYFNFGAKGIWTGMIGGTVIQTFILAWVTFRTDWTKEVEEASKRLDKWSNKKQEVVPE

SEQ ID NO: 32642 - DNA, 1102 bp, Arabidopsis thaliana
  misc_feature (1)..(1102): Ceres Seq. ID no. 13593706
ggtgtaaaggaagcgcctttttctctcctccatcgtaattcgcagagaagacacactacattgactgagagggaacaaacacaaagcgatgtcgcaactcttatcgactcctctaatggcggtcaactccaatcctcgctttctctcttcgtcttcagtactcgtcaccggaggttttgcagtgaaacggcatggattcgccttgaaaccgacgacgaagacggtgaagctcttctcggttaagtctcgccagacggattacttcgagaagcagaggttcggtgactcttcttcttctccttcacctgctgaaggattgcctgctagattttacgtgggtcattcgatatacaaagggaaagctgcgttaacagtggacccaagagcaccagagtttgtggctttagactctggagctttcaagttgtcaaaagatggtttcttattgctccagtttgctccttctgctggtgtacgacaatatgattggagcaagaaacaggtgttctcattgtctgttacagaaattggaactctagttagcctaggcccgagggaatcttgtgaattcttccatgatccattcaaggggaaaagtgatgagggaaaagtaaggaaagtgttgaaagttgagcctctcccagatggttctggtcatttcttcaacctaagtgttcaaaacaagcttgtgaatgtggatgagagcatttacataccaattactcgagcagagtttgctgttcttatctctgcattcaattttgtcttgccttaccttataggctggcatgcatttgcaaactccatcaaaccagaagagacaagccgtgtgaacaacgcttcgcctaactatggaggagactatgaatggaatagatgatgaatcttagggccataacaggaacatatatcagagatcatcctaccctttttgttttgctgataggtttcgtcaggattgatatatgttcgtaggtagcagaagagactaaaagtagtttattttttcgtccttttgaccaaatgttcaaaagccacatatcatttcgtggtaagcggttgtatctcaaaacatcagtctgatcttagttgtttttgattt

SEQ ID NO: 32643 - protein, 263 aa, Arabidopsis thaliana
  misc_feature (1)..(263): Ceres Seq. ID no. 13593707
MSQLLSTPLMAVNSNPRFLSSSSVLVTGGFAVKRHGFALKPTTKTVKLFSVKSRQTDYFEKQRFGDSSSSPSPAEGLPARFYVGHSIYKGKAALTVDPRAPEFVALDSGAFKLSKDGFLLLQFAPSAGVRQYDWSKKQVFSLSVTEIGTLVSLGPRESCEFFHDPFKGKSDEGKVRKVLKVEPLPDGSGHFFNLSVQNKLVNVDESIYIPITRAEFAVLISAFNFVLPYLIGWHAFANSIKPEETSRVNNASPNYGGDYEWNR

SEQ ID NO: 32644 - protein, 254 aa, Arabidopsis thaliana
  misc_feature (1)..(254): Ceres Seq. ID no. 13593708
MAVNSNPRFLSSSSVLVTGGFAVKRHGFALKPTTKTVKLFSVKSRQTDYFEKQRFGDSSSSPSPAEGLPARFYVGHSIYKGKAALTVDPRAPEFVALDSGAFKLSKDGFLLLQFAPSAGVRQYDWSKKQVFSLSVTEIGTLVSLGPRESCEFFHDPFKGKSDEGKVRKVLKVEPLPDGSGHFFNLSVQNKLVNVDESIYIPITRAEFAVLISAFNFVLPYLIGWHAFANSIKPEETSRVNNASPNYGGDYEWNR

SEQ ID NO: 32645 - DNA, 1086 bp, Arabidopsis thaliana
  misc_feature (1)..(1086): Ceres Seq. ID no. 13593730
atgggttacatttcaatgtccgtggttgcattccttgttgtttttgcttcgccggtggttctagccaccgatacagatccgattccagaaaacagagcccaaatcccgcaatggtttaaaacaaacgttaaaccatattcccagagaaagggcacgctagaccccgccctcgaagctgctgaagcagcgcgacaaattatcaccgtgaatcaaaaaggtggcgctaatttcaagacattaaacgaagctatcaagagcattccgacaggaaacaagaaccgtgtgatcatcaagttggctcctggtgtatacaatgagaaggtcacaatcgacatagctcgaccattcattacattgcttggtcaacctggtgcggaaacggtcttgacttaccacgggacagccgctcagtacggaaccgttgagagtgcaactcttatcgtctgggctgaatatttccaggcagctcacctcaccattaaaaacactgctccaatgccgaaaccaggttcacagggacaagctctagcaatgaggatcaacgctgataaggcagctttctatagttgtagattccatggttttcaagatactctctgtgacgacaagggcaaccatttcttcaaggattgttacatcgaaggaacttatgattttatctttggaagaggagcttccttgtacttgaatacgcaattgcacgctgttggagatggattaagagtgatcacagctcaaggtagacaaagtgcaaccgaacaaaacggatacacgttcgtgcactgcaaagtcactggaaccggaaccggaatctatttgggcaggtcttggatgagccaccctaaagtcgtctatgctttcacagagatgaccagcgtggtcaatccatctggctggagggagaacctcaaccgcggatatgacaagacggtgttctatggagaatacaagtgtttcggaccagggtcacacttagagaagagagtgccttacacacaagatattgacaaaaacgaagttacgcctttcctcactcttggttacattaagggctccacatggctacttcctcctcctaaatactga

SEQ ID NO: 32646 - protein, 361 aa, Arabidopsis thaliana
  misc_feature (1)..(361): Ceres Seq. ID no. 13593731
MGYISMSVVAFLVVFASPVVLATDTDPIPENRAQIPQWFKTNVKPYSQRKGTLDPALEAAEAARQIITVNQKGGANFKTLNEAIKSIPTGNKNRVIIKLAPGVYNEKVTIDIARPFITLLGQPGAETVLTYHGTAAQYGTVESATLIVWAEYFQAAHLTIKNTAPMPKPGSQGQALAMRINADKAAFYSCRFHGFQDTLCDDKGNHFFKDCYIEGTYDFIFGRGASLYLNTQLHAVGDGLRVITAQGRQSATEQNGYTFVHCKVTGTGTGIYLGRSWMSHPKVVYAFTEMTSVVNPSGWRENLNRGYDKTVFYGEYKCFGPGSHLEKRVPYTQDIDKNEVTPFLTLGYIKGSTWLLPPPKY

SEQ ID NO: 32647 - protein, 356 aa, Arabidopsis thaliana
  misc_feature (1)..(356): Ceres Seq. ID no. 13593732
MSVVAFLVVFASPVVLATDTDPIPENRAQIPQWFKTNVKPYSQRKGTLDPALEAAEAARQIITVNQKGGANFKTLNEAIKSIPTGNKNRVIIKLAPGVYNEKVTIDIARPFITLLGQPGAETVLTYHGTAAQYGTVESATLIVWAEYFQAAHLTIKNTAPMPKPGSQGQALAMRINADKAAFYSCRFHGFQDTLCDDKGNHFFKDCYIEGTYDFIFGRGASLYLNTQLHAVGDGLRVITAQGRQSATEQNGYTFVHCKVTGTGTGIYLGRSWMSHPKVVYAFTEMTSVVNPSGWRENLNRGYDKTVFYGEYKCFGPGSHLEKRVPYTQDIDKNEVTPFLTLGYIKGSTWLLPPPKY

SEQ ID NO: 32648 - protein, 196 aa, Arabidopsis thaliana
  misc_feature (1)..(196): Ceres Seq. ID no. 13593733
MPKPGSQGQALAMRINADKAAFYSCRFHGFQDTLCDDKGNHFFKDCYIEGTYDFIFGRGASLYLNTQLHAVGDGLRVITAQGRQSATEQNGYTFVHCKVTGTGTGIYLGRSWMSHPKVVYAFTEMTSVVNPSGWRENLNRGYDKTVFYGEYKCFGPGSHLEKRVPYTQDIDKNEVTPFLTLGYIKGSTWLLPPPKY

SEQ ID NO: 32649 - DNA, 1075 bp, Arabidopsis thaliana
  misc_feature (1)..(1075): Ceres Seq. ID no. 13593739
aagcagaggagttatactttactacttactaatctctccctctctctatctgactctttgatcggaaaaaatggcggagaaaaatgcgagcgcggtggacggtgcaattagggttagtggaatgcagttttcttacgatgttcaagatcctattttcttcgattttaatctcgatcttcccgctggatctcgttgcctcttggttggtgccaatggatctgggaaaactacgttattgaagattcttgctggaaaacatatggttggaggaaagaatgttgtacaagtgcttgatcgctcagcatttcatgatacagagcttgtttgtagtggtgatttgtcttacctaggaggatcatggagtaaaactgctggttctgctggtgatattccactccaaggagacttctcagcagaacatatgatatttggagttgaagggattgatcctttcagaagagagaagttgattgatcttcttgatatcaatcttcaatggcgtatgcataaggtttctgatgggcagagacgtcgagtgcaaatatgtatgggtctattacatccgttcaaggtattactactggatgaagttactgttgacctcgacgttgttgctaggatggatttgttggagttctttaaagaagaatgtgaacagagaggagctacaattgtatatgcaactcatattttcgacgggctcgagacatgggctagtcatttggcttacattaatggaggagagctgaaactctcggccaagttagatgagatcaaggatctcaaaacctcaccaaatctgctatctgttgttgaagcttggctccggtctgaaaccaaagttgagaaaaagacgaagaagaaacctgttgttacctctccatttatgtcgtctagacaaatggcatattaccgatgaatcttaacttgtttatgagatcagtaagaataagagcactgcttctacagatgcctttgttttctatggtacttcattgtttagaatccgataatttttatcacacatgaaagaatttctgtaaaaccacgtttttaattaaattactattttgcc

SEQ ID NO: 32650 - protein, 282 aa, Arabidopsis thaliana
  misc_feature (1)..(282): Ceres Seq. ID no. 15221238
MAEKNASAVDGAIRVSGMQFSYDVQDPIFFDFNLDLPAGSRCLLVGANGSGKTTLLKILAGKHMVGGKNVVQVLDRSAFHDTELVCSGDLSYLGGSWSKTAGSAGDIPLQGDFSAEHMIFGVEGIDPFRREKLIDLLDINLQWRMHKVSDGQRRRVQICMGLLHPFKVLLLDEVTVDLDVVARMDLLEFFKEECEQRGATIVYATHIFDGLETWASHLAYINGGELKLSAKLDEIKDLKTSPNLLSVVEAWLRSETKVEKKTKKKPVVTSPFMSSRQMAYYR

SEQ ID NO: 32651 - protein, 265 aa, Arabidopsis thaliana
  misc_feature (1)..(265): Ceres Seq. ID no. 15221239
MQFSYDVQDPIFFDFNLDLPAGSRCLLVGANGSGKTTLLKILAGKHMVGGKNVVQVLDRSAFHDTELVCSGDLSYLGGSWSKTAGSAGDIPLQGDFSAEHMIFGVEGIDPFRREKLIDLLDINLQWRMHKVSDGQRRRVQICMGLLHPFKVLLLDEVTVDLDVVARMDLLEFFKEECEQRGATIVYATHIFDGLETWASHLAYINGGELKLSAKLDEIKDLKTSPNLLSVVEAWLRSETKVEKKTKKKPVVTSPFMSSRQMAYYR

SEQ ID NO: 32652 - protein, 219 aa, Arabidopsis thaliana
  misc_feature (1)..(219): Ceres Seq. ID no. 15221240
MVGGKNVVQVLDRSAFHDTELVCSGDLSYLGGSWSKTAGSAGDIPLQGDFSAEHMIFGVEGIDPFRREKLIDLLDINLQWRMHKVSDGQRRRVQICMGLLHPFKVLLLDEVTVDLDVVARMDLLEFFKEECEQRGATIVYATHIFDGLETWASHLAYINGGELKLSAKLDEIKDLKTSPNLLSVVEAWLRSETKVEKKTKKKPVVTSPFMSSRQMAYYR

SEQ ID NO: 32653 - DNA, 1020 bp, Arabidopsis thaliana
  misc_feature (1)..(1020): Ceres Seq. ID no. 13593740
atggtgacggagctggaagagcttgtcgaatttttgtcatctccttcaccgcctgtgaagaaagctgcggtggaaattgttagtggtttaactggttccgaggaaggtttacaatctctatcaaagtattccgagattcttcttccatcattgtctcagcttctaaatgaaagcaaggaggtatcagagccagcagctcaagctcttgttaatctttctcagaagtgtgaattggcaaagaagatgattcaaatgggtttgattaaagtggccatggacatgttgtataagccagagtcttgtattaccagattacttgttatgcttctagtgaatcttactcagttggatgatggggtttcttctttgcttcagattgacgatgagaagatgcatggactacatatcatgaagcttgttaggtcattttgcaggtcttctggtgaaactgctgatgatcagtttgagcatgttggttcgatccttgtcaacatatcaaaaacagaagatgggaggaaattgttactggagccaaagagacgactattaaaacagatcattaggcagtttgattcaacaaatcaattgcgaaagaaaggggttgctgggactattcgtaactgttgttttgaagccaaaaaccaactccagaatatactcttgatatcagagtttctttggcccgctctgctcctaccagttgcaggcagcaagacatacagtgagcaagatgtcgcaaaaatgccacctgagcttggaagtgcactgtccattgagcgagaaccagttactgatcctgacattcgcgttcagacactcgaagctatatatttgatcatcttagaggaggcaggtcgaagggcattttggtcagtcaacggcccacggattctacaattgggatacgaatatgaagaagatccgaaagcaatgagagcctatgagcaagtcggttctttgcttgttgaggaagctggaggtccggaagagtcgttggagccaacaaaagcagagtcttga

SEQ ID NO: 32654 - protein, 339 aa, Arabidopsis thaliana
  misc_feature (1)..(339): Ceres Seq. ID no. 13593741
MVTELEELVEFLSSPSPPVKKAAVEIVSGLTGSEEGLQSLSKYSEILLPSLSQLLNESKEVSEPAAQALVNLSQKCELAKKMIQMGLIKVAMDMLYKPESCITRLLVMLLVNLTQLDDGVSSLLQIDDEKMHGLHIMKLVRSFCRSSGETADDQFEHVGSILVNISKTEDGRKLLLEPKRRLLKQIIRQFDSTNQLRKKGVAGTIRNCCFEAKNQLQNILLISEFLWPALLLPVAGSKTYSEQDVAKMPPELGSALSIEREPVTDPDIRVQTLEAIYLIILEEAGRRAFWSVNGPRILQLGYEYEEDPKAMRAYEQVGSLLVEEAGGPEESLEPTKAES

SEQ ID NO: 32655 - protein, 258 aa, Arabidopsis thaliana
  misc_feature (1)..(258): Ceres Seq. ID no. 13593742
MIQMGLIKVAMDMLYKPESCITRLLVMLLVNLTQLDDGVSSLLQIDDEKMHGLHIMKLVRSFCRSSGETADDQFEHVGSILVNISKTEDGRKLLLEPKRRLLKQIIRQFDSTNQLRKKGVAGTIRNCCFEAKNQLQNILLISEFLWPALLLPVAGSKTYSEQDVAKMPPELGSALSIEREPVTDPDIRVQTLEAIYLIILEEAGRRAFWSVNGPRILQLGYEYEEDPKAMRAYEQVGSLLVEEAGGPEESLEPTKAES

SEQ ID NO: 32656 - protein, 255 aa, Arabidopsis thaliana
  misc_feature (1)..(255): Ceres Seq. ID no. 13593743
MGLIKVAMDMLYKPESCITRLLVMLLVNLTQLDDGVSSLLQIDDEKMHGLHIMKLVRSFCRSSGETADDQFEHVGSILVNISKTEDGRKLLLEPKRRLLKQIIRQFDSTNQLRKKGVAGTIRNCCFEAKNQLQNILLISEFLWPALLLPVAGSKTYSEQDVAKMPPELGSALSIEREPVTDPDIRVQTLEAIYLIILEEAGRRAFWSVNGPRILQLGYEYEEDPKAMRAYEQVGSLLVEEAGGPEESLEPTKAES

SEQ ID NO: 32657 - DNA, 1275 bp, Arabidopsis thaliana
  misc_feature (1)..(1275): Ceres Seq. ID no. 13593756
atgggatgtttcggacgcactccgaaatcgaacaaacgatcagataccaaaaccacgaagaacaacgatttcaccccaaaaaaactcaccgtcaatgcaaatcgagataagctgacacaacccagctcagattgtttaaaagttagtatatgtggagatgtaagcaaggagatagttactaagaaggatcaattagctttggatgctaaagatactaatgttgaagatgaagttatagtgaagaaagcacagacttttacatttgaagaactctctgtttctactggaaactttaagtcggattgttttctaggagaaggaggttttggaaaagtttacaaaggtttcattgagaaaatcaatcaggttgttgcaattaagcaacttgatcggaatggtgctcaaggaatcagggagtttgttgttgaagtgttgacattaagtctcgctgatcatccaaatctcgtcaagcttataggattttgcgctgagggtgttcagagactgttggtttacgagtatatgcctctaggatctctggataatcaccttcatgatcttccttctggtaaaaacccgcttgcttggaacactcgaatgaaaatagcggctggtgcagcaagaggactagagtatctccacgatacaatgaaacctcctgtgatataccgtgatcttaagtgttcgaatatcttgatcgatgaaggatatcacgcaaaactctcagactttggattagctaaagtaggaccaagaggaagtgaaactcatgtttccacaagagttatgggaacatacggttactgtgctcctgattacgcattaactggacaactcacattcaaatcagatgtatacagtttcggagttgttcttttggagcttattactggaaggaaagcttacgataacacgagaacacgtaatcaccagagtcttgttgaatgggcaaatcccttgtttaaagataggaagaatttcaagaaaatggttgatccgttactcgaaggagattatccggttagaggattgtatcaagcacttgcaatagctgcaatgtgtgttcaagaacagcctagtatgagaccggtgatagctgatgtagtaatggctttggatcacttagcttcttctaaatatgatcgtagtcaccgtcaaaagcaggataatgtgaccgagactaaagtcgatgaagagaaaacacttaccacagaatctaatgtttgtgtggaggagaaacaagagatcaagatatgctcagatcaagcaacttaa

SEQ ID NO: 32658 - protein, 424 aa, Arabidopsis thaliana
  misc_feature (1)..(424): Ceres Seq. ID no. 13593757
MGCFGRTPKSNKRSDTKTTKNNDFTPKKLTVNANRDKLTQPSSDCLKVSICGDVSKEIVTKKDQLALDAKDTNVEDEVIVKKAQTFTFEELSVSTGNFKSDCFLGEGGFGKVYKGFIEKINQVVAIKQLDRNGAQGIREFVVEVLTLSLADHPNLVKLIGFCAEGVQRLLVYEYMPLGSLDNHLHDLPSGKNPLAWNTRMKIAAGAARGLEYLHDTMKPPVIYRDLKCSNILIDEGYHAKLSDFGLAKVGPRGSETHVSTRVMGTYGYCAPDYALTGQLTFKSDVYSFGVVLLELITGRKAYDNTRTRNHQSLVEWANPLFKDRKNFKKMVDPLLEGDYPVRGLYQALAIAAMCVQEQPSMRPVIADVVMALDHLASSKYDRSHRQKQDNVTETKVDEEKTLTTESNVCVEEKQEIKICSDQAT

SEQ ID NO: 32659 - protein, 250 aa, Arabidopsis thaliana
  misc_feature (1)..(250): Ceres Seq. ID no. 13593758
MPLGSLDNHLHDLPSGKNPLAWNTRMKIAAGAARGLEYLHDTMKPPVIYRDLKCSNILIDEGYHAKLSDFGLAKVGPRGSETHVSTRVMGTYGYCAPDYALTGQLTFKSDVYSFGVVLLELITGRKAYDNTRTRNHQSLVEWANPLFKDRKNFKKMVDPLLEGDYPVRGLYQALAIAAMCVQEQPSMRPVIADVVMALDHLASSKYDRSHRQKQDNVTETKVDEEKTLTTESNVCVEEKQEIKICSDQAT

SEQ ID NO: 32660 - protein, 225 aa, Arabidopsis thaliana
  misc_feature (1)..(225): Ceres Seq. ID no. 13593759
MKIAAGAARGLEYLHDTMKPPVIYRDLKCSNILIDEGYHAKLSDFGLAKVGPRGSETHVSTRVMGTYGYCAPDYALTGQLTFKSDVYSFGVVLLELITGRKAYDNTRTRNHQSLVEWANPLFKDRKNFKKMVDPLLEGDYPVRGLYQALAIAAMCVQEQPSMRPVIADVVMALDHLASSKYDRSHRQKQDNVTETKVDEEKTLTTESNVCVEEKQEIKICSDQAT

SEQ ID NO: 32661 - DNA, 498 bp, Arabidopsis thaliana
  misc_feature (1)..(498): Ceres Seq. ID no. 13593764
atggacgatctcttgggcctccttagaatccgtatcaaacgtggcgtcaatttagccgtccgtgacatcagtagcagcgatccttacgtcgtcgtcaagatgggcaaacagaaattgaagactcgtgtcattaacaaagatgttaatccagaatggaatgaagatttgactctctccgtcacagactccaatcttaccgtcctcttgacggtgtatgatcacgacatgtttagcaaagacgacaagatgggcgatgctgagttcgagataaagccctatattgaggctttgaggatgcaactcgatggacttcctagtggaaccattgtgaccacggttaagccaagtcgtcgtaactgtctagccgaggagtcacgtgtcacctgggtcgacggcaagctcgtccaggatctcgttctcagattgcgacatgtggaatgcggagaggtcgaggctcagcttcaatggattgacctccctggctccaagggtctatga

SEQ ID NO: 32662 - protein, 165 aa, Arabidopsis thaliana
  misc_feature (1)..(165): Ceres Seq. ID no. 13593765
MDDLLGLLRIRIKRGVNLAVRDISSSDPYVVVKMGKQKLKTRVINKDVNPEWNEDLTLSVTDSNLTVLLTVYDHDMFSKDDKMGDAEFEIKPYIEALRMQLDGLPSGTIVTTVKPSRRNCLAEESRVTWVDGKLVQDLVLRLRHVECGEVEAQLQWIDLPGSKGL

SEQ ID NO: 32663 - protein, 132 aa, Arabidopsis thaliana
  misc_feature (1)..(132): Ceres Seq. ID no. 13593766
MGKQKLKTRVINKDVNPEWNEDLTLSVTDSNLTVLLTVYDHDMFSKDDKMGDAEFEIKPYIEALRMQLDGLPSGTIVTTVKPSRRNCLAEESRVTWVDGKLVQDLVLRLRHVECGEVEAQLQWIDLPGSKGL

SEQ ID NO: 32664 - protein, 90 aa, Arabidopsis thaliana
  misc_feature (1)..(90): Ceres Seq. ID no. 13593767
MFSKDDKMGDAEFEIKPYIEALRMQLDGLPSGTIVTTVKPSRRNCLAEESRVTWVDGKLVQDLVLRLRHVECGEVEAQLQWIDLPGSKGL

SEQ ID NO: 32665 - DNA, 1767 bp, Arabidopsis thaliana
  misc_feature (1)..(1767): Ceres Seq. ID no. 13593792
atctctcgtcttcaccattcttctcacttcttcttttctccttatatttcatttcttccacataactaaaaaaaaaaggaattagcgatgaggggaggtgatggagaagaaggatcggagtcaagagttgcactgttgaaaagtcctcacacggcggaggaagacggtgaaggattgaaggatagaattttggttgagacaaaaaagctatggcaaatagttggtccggccatattcagtcgagtaacgacatattcgatgcttgtaatcactcaagctttcgctggtcatctcggcgatcttgaactcgccgccatatccatcgttaataacgtcaccgttggcttcaactttggcctcttgcttggaatggcgagtgcgttggaaacgctgtgtggacaagcgtttggagcgaagaaatatcatatgttgggagtttatatgcagcgttcttggattgttctcttcttttgctgtgtcttgttattaccaacttatattttcactactccggttcttaaatttcttggtcaaccggacgatatcgctgagctgtccggtgttgtcgccatttgggtcataccgcttcatttcgccttcactttgtcttttccccttcaacgtttccttcagtgccagctcaaaaaccgagtgactgcgtatgcggcagcggttgcattggtggttcatattttagtgtgttggttgttcgtggacgggcttaaactaggagtcgtggggactgtagctacgattagtatctcgtggtgggtcaatgttcttattctgttagtttactctacttgtggtggttgtccgcttacttggaccggcttatcctctgaagccttaaccggactttgggaattccttaaactctctgcttcttcaggcgtcatgctctgtttggagaattggtattatcggattttgattataatgactgggaatcttcaaaatgctcgaatcgccgttgactccttgtccatatgcatggcgataaatggttgggagatgatgatacctctcgctttcttcgccggaaccggtgtccgtgtggcgaacgaattaggagctggtaatggtaaaggagcaagatttgcgacgattgtatcggtaacacaatcgttgataatcggattgtttttttgggtgctaataatgcttctccataaccaaatcgcatggatcttctcttcgagtgtagccgtcttagacgccgtcaataaactctcacttctgctagctttcaccgttcttcttaacagcgttcaaccggttctttccggtgtggcggttggatcgggttggcaatcgtacgtggcatatataaacttgggatgttactattgcattggtgttccacttgggtttctcatgggctggggttttaaactcggtgtcatgggaatttggggtggtatgatttttggaggaaccgctgttcaaaccatgatcttaagttttatcacaatgagatgtgactgggaaaaagaggcgcagaaagcaagtgctcgtattaacaaatggtccaacacaataaaatgattcaagattttgttgaatcaactattaaataattttgcagcataatatggttttggaaaactggtgtatgttttgtatccaaatgtgatacaacatatttagagccggttcatagattacataggatcgctgcaattactgcaaaatggcctttgtgattttctttttatagcatgccttgtaatattattagataaaactgctttattttaatttagt

SEQ ID NO: 32666 - protein, 486 aa, Arabidopsis thaliana
  misc_feature (1)..(486): Ceres Seq. ID no. 13593793
MRGGDGEEGSESRVALLKSPHTAEEDGEGLKDRILVETKKLWQIVGPAIFSRVTTYSMLVITQAFAGHLGDLELAAISIVNNVTVGFNFGLLLGMASALETLCGQAFGAKKYHMLGVYMQRSWIVLFFCCVLLLPTYIFTTPVLKFLGQPDDIAELSGVVAIWVIPLHFAFTLSFPLQRFLQCQLKNRVTAYAAAVALVVHILVCWLFVDGLKLGVVGTVATISISWWVNVLILLVYSTCGGCPLTWTGLSSEALTGLWEFLKLSASSGVMLCLENWYYRILIIMTGNLQNARIAVDSLSICMAINGWEMMIPLAFFAGTGVRVANELGAGNGKGARFATIVSVTQSLIIGLFFWVLIMLLHNQIAWIFSSSVAVLDAVNKLSLLLAFTVLLNSVQPVLSGVAVGSGWQSYVAYINLGCYYCIGVPLGFLMGWGFKLGVMGIWGGMIFGGTAVQTMILSFITMRCDWEKEAQKASARINKWSNTIK

SEQ ID NO: 32667 - protein, 429 aa, Arabidopsis thaliana
  misc_feature (1)..(429): Ceres Seq. ID no. 13593794
MLVITQAFAGHLGDLELAAISIVNNVTVGFNFGLLLGMASALETLCGQAFGAKKYHMLGVYMQRSWIVLFFCCVLLLPTYIFTTPVLKFLGQPDDIAELSGVVAIWVIPLHFAFTLSFPLQRFLQCQLKNRVTAYAAAVALVVHILVCWLFVDGLKLGVVGTVATISISWWVNVLILLVYSTCGGCPLTWTGLSSEALTGLWEFLKLSASSGVMLCLENWYYRILIIMTGNLQNARIAVDSLSICMAINGWEMMIPLAFFAGTGVRVANELGAGNGKGARFATIVSVTQSLIIGLFFWVLIMLLHNQIAWIFSSSVAVLDAVNKLSLLLAFTVLLNSVQPVLSGVAVGSGWQSYVAYINLGCYYCIGVPLGFLMGWGFKLGVMGIWGGMIFGGTAVQTMILSFITMRCDWEKEAQKASARINKWSNTIK

SEQ ID NO: 32668 - protein, 392 aa, Arabidopsis thaliana
  misc_feature (1)..(392): Ceres Seq. ID no. 13593795
MASALETLCGQAFGAKKYHMLGVYMQRSWIVLFFCCVLLLPTYIFTTPVLKFLGQPDDIAELSGVVAIWVIPLHFAFTLSFPLQRFLQCQLKNRVTAYAAAVALVVHILVCWLFVDGLKLGVVGTVATISISWWVNVLILLVYSTCGGCPLTWTGLSSEALTGLWEFLKLSASSGVMLCLENWYYRILIIMTGNLQNARIAVDSLSICMAINGWEMMIPLAFFAGTGVRVANELGAGNGKGARFATIVSVTQSLIIGLFFWVLIMLLHNQIAWIFSSSVAVLDAVNKLSLLLAFTVLLNSVQPVLSGVAVGSGWQSYVAYINLGCYYCIGVPLGFLMGWGFKLGVMGIWGGMIFGGTAVQTMILSFITMRCDWEKEAQKASARINKWSNTIK

SEQ ID NO: 32669 - DNA, 849 bp, Arabidopsis thaliana
  misc_feature (1)..(849): Ceres Seq. ID no. 13593799
atggcgaagttatgttgcttcggttcttcagactacgatcttgtggttgggagggcatcgactagttctggaaaagggagaaataacgacggcgagattaaattcggttacagcttagtgaaagggaaagctaatcatccaatggaggattatcatgtgtctaaattcgtgaaaatagacggtaacgagctcggtttgtttgcaatctacgatggtcatttgggtgaacgtgttcctgcttatctacagaagcatttgttctccaatatcctcaaagaggagcagtttaggtatgatcctcagagatcaataattgctgcctatgagaagacagaccaagccattctgtcacattcttctgacttaggccgtggtggctcaacggctgtaaccgctattctgatgaatggacggcgtttatgggtggcaaatgtgggtgattctcgggcggttctatctcaaggaggtcaggcaatacagatgactattgatcatgagccgcacactgaaaggttgagcatcgagggtaaaggaggctttgtatccaacatgccaggagatgtccctcgggttaacgggcagctagcggtttctcgtgcttttggagacaaaagcctcaaaacacatctacggtcagatcctgacgttaaagattcatcgatcgatgatcacacagatgttcttgttcttgctagtgacggtctatggaaggtgatggctaaccaagaggcgattgatattgcgagaagaatcaaagatccattgaaagcagcgaaagaactaacaaccgaagcgcttagaagagacagtaaagatgatatttcttgcattgtcgtcagattaaggtga

SEQ ID NO: 32670 - protein, 282 aa, Arabidopsis thaliana
  misc_feature (1)..(282): Ceres Seq. ID no. 13593800
MAKLCCFGSSDYDLVVGRASTSSGKGRNNDGEIKFGYSLVKGKANHPMEDYHVSKFVKIDGNELGLFAIYDGHLGERVPAYLQKHLFSNILKEEQFRYDPQRSIIAAYEKTDQAILSHSSDLGRGGSTAVTAILMNGRRLWVANVGDSRAVLSQGGQAIQMTIDHEPHTERLSIEGKGGFVSNMPGDVPRVNGQLAVSRAFGDKSLKTHLRSDPDVKDSSIDDHTDVLVLASDGLWKVMANQEAIDIARRIKDPLKAAKELTTEALRRDSKDDISCIVVRLR

SEQ ID NO: 32671 - protein, 235 aa, Arabidopsis thaliana
  misc_feature (1)..(235): Ceres Seq. ID no. 13593801
MEDYHVSKFVKIDGNELGLFAIYDGHLGERVPAYLQKHLFSNILKEEQFRYDPQRSIIAAYEKTDQAILSHSSDLGRGGSTAVTAILMNGRRLWVANVGDSRAVLSQGGQAIQMTIDHEPHTERLSIEGKGGFVSNMPGDVPRVNGQLAVSRAFGDKSLKTHLRSDPDVKDSSIDDHTDVLVLASDGLWKVMANQEAIDIARRIKDPLKAAKELTTEALRRDSKDDISCIVVRLR

SEQ ID NO: 32672 - protein, 148 aa, Arabidopsis thaliana
  misc_feature (1)..(148): Ceres Seq. ID no. 13593802
MNGRRLWVANVGDSRAVLSQGGQAIQMTIDHEPHTERLSIEGKGGFVSNMPGDVPRVNGQLAVSRAFGDKSLKTHLRSDPDVKDSSIDDHTDVLVLASDGLWKVMANQEAIDIARRIKDPLKAAKELTTEALRRDSKDDISCIVVRLR

SEQ ID NO: 32673 - DNA, 1127 bp, Arabidopsis thaliana
  misc_feature (1)..(1127): Ceres Seq. ID no. 13593807
agctacacacgagaaagaaaaagctcacaactttaacctttctggagagagaagaacaaaagagggagagggagagaaatggaaggcaaagaagaagatgtacgagtgggagctaacaagttcccggagaggcaacccatcggtacatcggctcagtccaccgacaaggactacaaagagccacctcctgcgccactgttcgagcccggcgagctcagctcatggtctttctacagagccggaatagctgagtttatcgctactttcttgtttctctacatcactgttttgactgtaatgggagttaagagagcaccaaacatgtgtgcttctgttggaatccaaggtatcgcttgggcttttggtggcatgatctttgctcttgtctactgtactgctggaatttcaggtggacacatcaaccctgctgtaacatttggtctgttcttggctcggaagttgtctctgaccagagctgtgttctacatgattatgcaatgtcttggagccatctgtggtgccggagtcgtcaaaggtttccagccaacgccgtaccagactctcggtggtggtgctaacaccgttgctcatggctacaccaaaggttctggccttggtgctgaaatcatcggaacattcgttctcgtctacactgtcttctccgccaccgacgccaagagaagcgcccgtgactcacacgtcccgattttggcgccgctcccaatcggatttgcagtgttcttggtacacttggcaacaataccgatcaccgggaccggaatcaacccagctagaagtcttggagccgcaattatctacaacaaggaccactcttgggatgaccattggattttctgggttggaccattcattggagcagctctagcagcactatatcaccagattgtcatcagagcgattcctttcaagagcaagagttagagacacacagaaagattccacggtccagaatttgttctttagtagtttctttgcttatctatctaatgtagcttgtgttttgcaatgtaatgagcctttcaagaatatgtatttgggatttctaatcagcttttgtctatgtaaaaaccatggtttatctttaaatgttgtttgaggttggcctc

SEQ ID NO: 32674 - protein, 287 aa, Arabidopsis thaliana; identical to SEQ ID NO: 32428
  misc_feature (1)..(287): Ceres Seq. ID no. 13593808

SEQ ID NO: 32675 - protein, 214 aa, Arabidopsis thaliana; identical to SEQ ID NO: 32429
  misc_feature (1)..(214): Ceres Seq. ID no. 13593809

SEQ ID NO: 32676 - protein, 206 aa, Arabidopsis thaliana; identical to SEQ ID NO: 32430
  misc_feature (1)..(206): Ceres Seq. ID no. 13593810

SEQ ID NO: 32677 - DNA, 1367 bp, Arabidopsis thaliana
  misc_feature (1)..(1367): Ceres Seq. ID no. 13593811
cccacgcgtccggaagccacggggggagcgctagcacttaaagatttgcaccgttttctctctggctttgtgttgtgctagatgcgatgcaatagcaatattttcctggagtttcaagtaactagtggcttaggttcataatagtgtttctttgtaggacgaaagctgtgttagtattctctccactgtaaaggacaagatgtctcagaagcgaaatcttccttcttggatgagttctagggatcccgagattactccgagtaagtctcattgtaagaagcctaaggatgaaggaccaaccgaagagcacaacagtagaaatgccccttccaacaagtcagaacacgccgagccaagttcaaataccactgaattctctaaacttatggaaggcgttgtttttgtactttcgggctttgttaatcctgagaggagtacactgaggtcacaagccttgacaatgggagccacctatcaacctgactggaacgctggctctaccttgttgatttgtgcttttcctaacactccaaagttccgtcaagttgaaacaaatggtggaacaattatctcaaaggagtggataactgagtgttatgcgcagaagaagttggtagatatcgagcaataccttatgcatgctggaaaaccatggaggaaaagcagtagtccccaagatgctaatcgagaaaagagagaacacctgtctaaaaaaccagagaagcaagtagagaaaaaaacagaaacaaggggaacaccatctacctcatccaagaatagatcagcttgcaatcttgtgaaagagccattttttgttacagaggtgaagaaatgggccagggatgacctaagtcaaaccatctcatggcttgagagtcaggaggaaaaaccagaaccaggcgaaatcaagcgaatagctgcggaaggagtcttaacctgcttacaagacgccatagattctcttgaacagaagcaggacattggatcagttacagagctatggagctttgtccctcgtgtagtgaaggagcttggaaagatggaatcgtcttctaaaaaggaaaattcaacagcatcaaaggaagaagtttgcaaacaagcaaagtcgtggaaaaagatctacgaagctgagctagcaaaaccgggcgaagatgaatcgacctctcgggttgcttgtggctatgacagtgatatgaccgttgagatgactgaagaagagatcgaacttgcttataggaacgtttctttagagtgtctttagatcaaacttgtttcattttgcatatgatctcttaaggaattccaagaattcttgttatactcggtttgttcggtttgagtaggatgttattactgataaaaatttg

SEQ ID NO: 32678 - protein, 353 aa, Arabidopsis thaliana
  misc_feature (1)..(353): Ceres Seq. ID no. 13593812
MSQKRNLPSWMSSRDPEITPSKSHCKKPKDEGPTEEHNSRNAPSNKSEHAEPSSNTTEFSKLMEGVVFVLSGFVNPERSTLRSQALTMGATYQPDWNAGSTLLICAFPNTPKFRQVETNGGTIISKEWITECYAQKKLVDIEQYLMHAGKPWRKSSSPQDANREKREHLSKKPEKQVEKKTETRGTPSTSSKNRSACNLVKEPFFVTEVKKWARDDLSQTISWLESQEEKPEPGEIKRIAAEGVLTCLQDAIDSLEQKQDIGSVTELWSFVPRVVKELGKMESSSKKENSTASKEEVCKQAKSWKKIYEAELAKPGEDESTSRVACGYDSDMTVEMTEEEIELAYRNVSLECL

SEQ ID NO: 32679 - protein, 343 aa, Arabidopsis thaliana
  misc_feature (1)..(343): Ceres Seq. ID no. 13593813
MSSRDPEITPSKSHCKKPKDEGPTEEHNSRNAPSNKSEHAEPSSNTTEFSKLMEGVVFVLSGFVNPERSTLRSQALTMGATYQPDWNAGSTLLICAFPNTPKFRQVETNGGTIISKEWITECYAQKKLVDIEQYLMHAGKPWRKSSSPQDANREKREHLSKKPEKQVEKKTETRGTPSTSSKNRSACNLVKEPFFVTEVKKWARDDLSQTISWLESQEEKPEPGEIKRIAAEGVLTCLQDAIDSLEQKQDIGSVTELWSFVPRVVKELGKMESSSKKENSTASKEEVCKQAKSWKKIYEAELAKPGEDESTSRVACGYDSDMTVEMTEEEIELAYRNVSLECL

SEQ ID NO: 32680 - protein, 291 aa, Arabidopsis thaliana
  misc_feature (1)..(291): Ceres Seq. ID no. 13593814
MEGVVFVLSGFVNPERSTLRSQALTMGATYQPDWNAGSTLLICAFPNTPKFRQVETNGGTIISKEWITECYAQKKLVDIEQYLMHAGKPWRKSSSPQDANREKREHLSKKPEKQVEKKTETRGTPSTSSKNRSACNLVKEPFFVTEVKKWARDDLSQTISWLESQEEKPEPGEIKRIAAEGVLTCLQDAIDSLEQKQDIGSVTELWSFVPRVVKELGKMESSSKKENSTASKEEVCKQAKSWKKIYEAELAKPGEDESTSRVACGYDSDMTVEMTEEEIELAYRNVSLECL

SEQ ID NO: 32681 - DNA, 687 bp, Arabidopsis thaliana
  misc_feature (1)..(687): Ceres Seq. ID no. 13593815
actcatttttctattactgaaatttttcttagagaagaagaagaagaggcaaaatggccacaagcgcatcagctttgctctcaccaaccacattctccactgcaatctcccacaaaaaccctaactccatctcattccatggccttcgtcccctccgtctaggtggctcctcctccgccctacccaaactatcaaccaccgggagaaaatcctcctccactgtcgtgagagctgagctaagcccttccatcgtcataagtctcaggtctctccctcttcctcggtcgtttcgtcttcttcaacttccagagagagaacgtagcaaaacagggcttaccggagcagaacggaaaaacccatttcgaagctggagatgatcgtgctaaggagtacgtcagtctcttgaaatcgaacgatccaattggattcaacattgttgatgttcttgcttggggttctattggacacatcgttgcttactacatcttggctacttccagcaatggatacgacccaagcttctttggatgattcgtttcaatgtcaatctctcgtatatgtatatgtatatgtttgacttgtgttgcaagctatctaatctgttctctatctctgtttcttcttctgttgttgttgttgttgtctaagacttgtccctctttttgcaaatgttttatttctccattt

SEQ ID NO: 32682 - protein, 107 aa, Arabidopsis thaliana
  misc_feature (1)..(107): Ceres Seq. ID no. 13593816
MATSASALLSPTTFSTAISHKNPNSISFHGLRPLRLGGSSSALPKLSTTGRKSSSTVVRAELSPSIVISLRSLPLPRSFRLLQLPERERSKTGLTGAERKNPFRSWR

SEQ ID NO: 32683 - protein, 53 aa, Arabidopsis thaliana
  misc_feature (1)..(53): Ceres Seq. ID no. 13593817
THFSITEIFLREEEEEAKWPQAHQLCSHQPHSPLQSPTKTLTPSHSMAFVPSV

SEQ ID NO: 32684 - DNA, 2566 bp, Arabidopsis thaliana
  misc_feature (1)..(2566): Ceres Seq. ID no. 13600753
atggcgcaaccaaggtacactaggatagataacaggaggccctcatcaaattattgctctacagtgacagtagttgtgtttgtggccctatgcttagtcgggatctggatgatgacatcatcttctgttggaccggctcagaatgttgatgaggtttctctggacaacaaagatgggataaagaaacagatgaccccacctgcagaggagggtaatggtcagaagtttgaagacgcacctgttgaaacaccgaacgaggataaaaaaggagatggtgatgcaagcttgcccaaagaggatgagagctcaagcaaacaagataaccaggaagagaagaaagaagagaaaactaaagaagagtttactccatccagtgagacgaaaagtgagaccgaaggtggggaagatcaaaaagatgactccaagtcagaaaatggtggtggaggtgatttagatgagaaaaaagatttgaaagacaactcagatgaagaaaatcctgacacaaatgaaaagcaaactaaaccagaaacagaggacaatgagttgggtgaggatggtgaaaaccaaaagcaatttgagtctgataacgagcaagagggtcaatccaaaaacgagacctcaggtgatctttcacctcctggggcacaattagagctactgaatgaaactaccgcacagaatggttcattttcaacccaggcaacagagtccaaaaatgagaaagaagctcagaagggttctggtgataaacttgattacaaatgggcactatgcaatacaacagcaggacctgattacattccctgtctcgataatgtgcaagccattaggagtcttccgagtactaaacattacgagcatcgtgagaggcattgcccagacagcccacccacctgccttgttcctttgcctgatggatacaagcggccaattgagtggcccaaaagtcgagaaaagatctggtacaccaacgtccctcataccaagcttgctgagtataaggggcatcaaaattgggttaaagttaccggtgagtatctaacttttcctggtggaggaacccaattcaagcatggtgctcttcattacatcgatttcatacaggagtctgtccctgctattgcatggggtaaacgctctcgtgtggtcctggatgttggatgcggtgttgcaagctttggaggtttcctctttgacagagatgtgatcactatgtctcttgcacctaaagatgaacatgaagctcaggtgcaatttgctcttgagaggggcattcccgccatttctgcagttatgggcacgacaaggctacctttccctggcagagtttttgacatagttcattgtgctcgctgtagagtgccatggcacattgaaggtggtaaacttctcctggagcttaaccgtgtattgagacccggtgggttctttgtgtggtctgctactcctgtttatcagaagaagaccgaagatgttgaaatttggaaagctatgagtgaactcattaagaagatgtgttgggaactcgtatccattaacaaggacactatcaatggagtaggtgttgctacttacagaaagccaacttcaaatgagtgctacaaaaacagatcagaaccggtgcctccaatttgtgcagactctgatgatccaaatgcatcttggaaagtgccgcttcaagcatgcatgcacaccgcgccggaagacaaaacgcaacgtggatctcagtggcccgaacaatggccagcgagattagagaaagcaccgttctggttatcaagttcccagactggagtttacggaaaagcagcaccagaggatttcagtgctgattatgagcactggaaacgcgtagtgaccaaatcataccttaatggtttaggaatcaactgggcatctgttagaaatgtgatggacatgagagccgtttatggaggttttgcggcagctctaagagatctgaaagtgtgggtcatgaatgtggttccaatagattcaccagacacacttgcaataatctatgaacgaggactctttggtatctaccacgattggtgcgaatctttcagtacatacccgagatcatatgatctccttcacgccgaccatcttttctccaaactcaaacaaaggtgcaatctaactgcggtgatagcagaagtggatcgtgttttgagaccggaagggaaactgatagttcgagacgatgcggaaacaatacagcaagtggaaggcatggtgaaagcgatgaaatgggaagttcgaatgacttattctaaggaaaaagaaggtttgctctctgttcaaaaatcaatctggcgacccagtgaagtggaaacactcacttacgctatcggttgagaagacttacttcaagtcccactcttttttgtacgtataaaaacactcttattaactccatatcatccctttttttgttggttcgtcttttaggaagttctttttttttagctgttgagtcatttgtttgtactattcgcacatttttgtgttcttgaaggtgaagaactctattgaggttctttggtaaagttagattacagtg

SEQ ID NO: 32685 - protein, 786 aa, Arabidopsis thaliana
  misc_feature (1)..(786): Ceres Seq. ID no. 13600754
MAQPRYTRIDNRRPSSNYCSTVTVVVFVALCLVGIWMMTSSSVGPAQNVDEVSLDNKDGIKKQMTPPAEEGNGQKFEDAPVETPNEDKKGDGDASLPKEDESSSKQDNQEEKKEEKTKEEFTPSSETKSETEGGEDQKDDSKSENGGGGDLDEKKDLKDNSDEENPDTNEKQTKPETEDNELGEDGENQKQFESDNEQEGQSKNETSGDLSPPGAQLELLNETTAQNGSFSTQATESKNEKEAQKGSGDKLDYKWALCNTTAGPDYIPCLDNVQAIRSLPSTKHYEHRERHCPDSPPTCLVPLPDGYKRPIEWPKSREKIWYTNVPHTKLAEYKGHQNWVKVTGEYLTFPGGGTQFKHGALHYIDFIQESVPAIAWGKRSRVVLDVGCGVASFGGFLFDRDVITMSLAPKDEHEAQVQFALERGIPAISAVMGTTRLPFPGRVFDIVHCARCRVPWHIEGGKLLLELNRVLRPGGFFVWSATPVYQKKTEDVEIWKAMSELIKKMCWELVSINKDTINGVGVATYRKPTSNECYKNRSEPVPPICADSDDPNASWKVPLQACMHTAPEDKTQRGSQWPEQWPARLEKAPFWLSSSQTGVYGKAAPEDFSADYEHWKRVVTKSYLNGLGINWASVRNVMDMRAVYGGFAAALRDLKVWVMNVVPIDSPDTLAIIYERGLFGIYHDWCESFSTYPRSYDLLHADHLFSKLKQRCNLTAVIAEVDRVLRPEGKLIVRDDAETIQQVEGMVKAMKWEVRMTYSKEKEGLLSVQKSIWRPSEVETLTYAIG

SEQ ID NO: 32686 - protein, 750 aa, Arabidopsis thaliana
  misc_feature (1)..(750): Ceres Seq. ID no. 13600755
MMTSSSVGPAQNVDEVSLDNKDGIKKQMTPPAEEGNGQKFEDAPVETPNEDKKGDGDASLPKEDESSSKQDNQEEKKEEKTKEEFTPSSETKSETEGGEDQKDDSKSENGGGGDLDEKKDLKDNSDEENPDTNEKQTKPETEDNELGEDGENQKQFESDNEQEGQSKNETSGDLSPPGAQLELLNETTAQNGSFSTQATESKNEKEAQKGSGDKLDYKWALCNTTAGPDYIPCLDNVQAIRSLPSTKHYEHRERHCPDSPPTCLVPLPDGYKRPIEWPKSREKIWYTNVPHTKLAEYKGHQNWVKVTGEYLTFPGGGTQFKHGALHYIDFIQESVPAIAWGKRSRVVLDVGCGVASFGGFLFDRDVITMSLAPKDEHEAQVQFALERGIPAISAVMGTTRLPFPGRVFDIVHCARCRVPWHIEGGKLLLELNRVLRPGGFFVWSATPVYQKKTEDVEIWKAMSELIKKMCWELVSINKDTINGVGVATYRKPTSNECYKNRSEPVPPICADSDDPNASWKVPLQACMHTAPEDKTQRGSQWPEQWPARLEKAPFWLSSSQTGVYGKAAPEDFSADYEHWKRVVTKSYLNGLGINWASVRNVMDMRAVYGGFAAALRDLKVWVMNVVPIDSPDTLAIIYERGLFGIYHDWCESFSTYPRSYDLLHADHLFSKLKQRCNLTAVIAEVDRVLRPEGKLIVRDDAETIQQVEGMVKAMKWEVRMTYSKEKEGLLSVQKSIWRPSEVETLTYAIG

SEQ ID NO: 32687 - protein, 749 aa, Arabidopsis thaliana
  misc_feature (1)..(749): Ceres Seq. ID no. 13600756
MTSSSVGPAQNVDEVSLDNKDGIKKQMTPPAEEGNGQKFEDAPVETPNEDKKGDGDASLPKEDESSSKQDNQEEKKEEKTKEEFTPSSETKSETEGGEDQKDDSKSENGGGGDLDEKKDLKDNSDEENPDTNEKQTKPETEDNELGEDGENQKQFESDNEQEGQSKNETSGDLSPPGAQLELLNETTAQNGSFSTQATESKNEKEAQKGSGDKLDYKWALCNTTAGPDYIPCLDNVQAIRSLPSTKHYEHRERHCPDSPPTCLVPLPDGYKRPIEWPKSREKIWYTNVPHTKLAEYKGHQNWVKVTGEYLTFPGGGTQFKHGALHYIDFIQESVPAIAWGKRSRVVLDVGCGVASFGGFLFDRDVITMSLAPKDEHEAQVQFALERGIPAISAVMGTTRLPFPGRVFDIVHCARCRVPWHIEGGKLLLELNRVLRPGGFFVWSATPVYQKKTEDVEIWKAMSELIKKMCWELVSINKDTINGVGVATYRKPTSNECYKNRSEPVPPICADSDDPNASWKVPLQACMHTAPEDKTQRGSQWPEQWPARLEKAPFWLSSSQTGVYGKAAPEDFSADYEHWKRVVTKSYLNGLGINWASVRNVMDMRAVYGGFAAALRDLKVWVMNVVPIDSPDTLAIIYERGLFGIYHDWCESFSTYPRSYDLLHADHLFSKLKQRCNLTAVIAEVDRVLRPEGKLIVRDDAETIQQVEGMVKAMKWEVRMTYSKEKEGLLSVQKSIWRPSEVETLTYAIG

SEQ ID NO: 32688 - DNA, 1573 bp, Arabidopsis thaliana
  misc_feature (1)..(1573): Ceres Seq. ID no. 13600765
acaagtaaactctctctgattctctctttctctctttctctcgctctctatctctctctctcctctgtttgttatatcaattaatcaagaagatttcttgtgtttttttttctgaaaaagaagatttcttgagagaaaataaggtggattgaaggattatcctttaagaatggtggtggaggaggagaatagaagcatggaggaaggacttcttcagcatcaaaacgacagagatgatcgtcgtatcacagcttgtgtcatcctcagcacttttgtcgctgtttgtagtgccttcagctacggatgtgccgctggttatacttcaggcgctgagactgctatcatgaaggagttagacctttctatggcacaattttcagcgtttggctcctttctgaatgtgggaggtgcggtgggggccttgttcagcggtcaattggcagtcatcctcggcagaagacgaacgttgtgggcatgcgattttttctgcgtttttggctggctctccattgctttcgcaaagaatgtcttctggctggacttgggaagaatttccttgggcataggagtcggcttgattagctacgtggtcccagtctatattgcggaaatcactccaaaacatgttcgtggcgcatttactgcttcaaaccagcttcttcaaaacagtggagtttccctgatttatttttttgggactgtaattaattggcgggttatggccgttataggtgcaattccatgcatccttcaaacgatcggtatattttttataccggaatctccaagatggctggctaaaatccgtttaagtaaagaagtagaaagttctttgcatcgacttagagggaaagatactgatgtttcaggtgaagcagctgaaattcaggttatgacaaaaatgcttgaagaagattcaaagtctagtttctctgacatgtttcagaagaagtacagacgaactcttgtggttggaattggtttaatgttgatacaacaattatctggagctagcggtatcacatattattcaaatgccatatttagaaaagctggcttttcagagagacttggatcaatgatatttggtgtgttcgtgatcccaaaagctttggttggtctgattcttgtggatagatggggaagacgaccactcctattggcttctgctgttggaatgtccatcggatccttgcttattggagttagcttcacgttacagcaaatgaatgtgcttcctgaattgatcccaattttcgtcttcgtaaacattctggtctacttcggatgttttgcattcggtataggagggctaccttgggtcattatgtctgagatctttccgataaatataaaagtttcagcaggaacaattgtagcattaacatcatggactagtgggtggttcgtgagttacgctttcaactttatgtttgaatggagcgcacaaggaacattttacatatttgcggctgtcggaggaatgtcattcatttttatttggatgctcgtaccggaaaccaaaggacaatcattggaagaattacaagcttcgcttacggggacatcctaa

SEQ ID NO: 32689 - protein, 467 aa, Arabidopsis thaliana
  misc_feature (1)..(467): Ceres Seq. ID no. 13600766
MVVEEENRSMEEGLLQHQNDRDDRRITACVILSTFVAVCSAFSYGCAAGYTSGAETAIMKELDLSMAQFSAFGSFLNVGGAVGALFSGQLAVILGRRRTLWACDFFCVFGWLSIAFAKNVFWLDLGRISLGIGVGLISYVVPVYIAEITPKHVRGAFTASNQLLQNSGVSLIYFFGTVINWRVMAVIGAIPCILQTIGIFFIPESPRWLAKIRLSKEVESSLHRLRGKDTDVSGEAAEIQVMTKMLEEDSKSSFSDMFQKKYRRTLVVGIGLMLIQQLSGASGITYYSNAIFRKAGFSERLGSMIFGVFVIPKALVGLILVDRWGRRPLLLASAVGMSIGSLLIGVSFTLQQMNVLPELIPIFVFVNILVYFGCFAFGIGGLPWVIMSEIFPINIKVSAGTIVALTSWTSGWFVSYAFNFMFEWSAQGTFYIFAAVGGMSFIFIWMLVPETKGQSLEELQASLTGTS

SEQ ID NO: 32690 - protein, 458 aa, Arabidopsis thaliana
  misc_feature (1)..(458): Ceres Seq. ID no. 13600767
MEEGLLQHQNDRDDRRITACVILSTFVAVCSAFSYGCAAGYTSGAETAIMKELDLSMAQFSAFGSFLNVGGAVGALFSGQLAVILGRRRTLWACDFFCVFGWLSIAFAKNVFWLDLGRISLGIGVGLISYVVPVYIAEITPKHVRGAFTASNQLLQNSGVSLIYFFGTVINWRVMAVIGAIPCILQTIGIFFIPESPRWLAKIRLSKEVESSLHRLRGKDTDVSGEAAEIQVMTKMLEEDSKSSFSDMFQKKYRRTLVVGIGLMLIQQLSGASGITYYSNAIFRKAGFSERLGSMIFGVFVIPKALVGLILVDRWGRRPLLLASAVGMSIGSLLIGVSFTLQQMNVLPELIPIFVFVNILVYFGCFAFGIGGLPWVIMSEIFPINIKVSAGTIVALTSWTSGWFVSYAFNFMFEWSAQGTFYIFAAVGGMSFIFIWMLVPETKGQSLEELQASLTGTS

SEQ ID NO: 32691 - protein, 409 aa, Arabidopsis thaliana
  misc_feature (1)..(409): Ceres Seq. ID no. 13600768
MKELDLSMAQFSAFGSFLNVGGAVGALFSGQLAVILGRRRTLWACDFFCVFGWLSIAFAKNVFWLDLGRISLGIGVGLISYVVPVYIAEITPKHVRGAFTASNQLLQNSGVSLIYFFGTVINWRVMAVIGAIPCILQTIGIFFIPESPRWLAKIRLSKEVESSLHRLRGKDTDVSGEAAEIQVMTKMLEEDSKSSFSDMFQKKYRRTLVVGIGLMLIQQLSGASGITYYSNAIFRKAGFSERLGSMIFGVFVIPKALVGLILVDRWGRRPLLLASAVGMSIGSLLIGVSFTLQQMNVLPELIPIFVFVNILVYFGCFAFGIGGLPWVIMSEIFPINIKVSAGTIVALTSWTSGWFVSYAFNFMFEWSAQGTFYIFAAVGGMSFIFIWMLVPETKGQSLEELQASLTGTS

SEQ ID NO: 32692 - DNA, 1382 bp, Arabidopsis thaliana
  misc_feature (1)..(1382): Ceres Seq. ID no. 13600777
gataagaaagaaagtcgtgaagatgagaggcgtaacaccaaactattaccattcttacactttcttcttcttcttcttcgttgtcttattagctctgtttcttcatgttttctcgataaacactttgtcatctacagaaactctaacaatctcaagcaaccgaaccattgtgtctcccggtaacatcttcgagctaggtttcttcaaaactacaacaagctctcgaaatggtgatcattggtatcttgggatttggtacaagtcaatctctgagagaacttatgtatgggttgccaacagagataaccctctttccaagtctatcggaacattaaagatctcttacgctaacctcgtccttcttgatcattctggtactcttgtttggtcaacgaatctaacgagaacggtgaaatctccagtggtggcagagctgctcgataacggcaacttcgtgcttagagactccaaaggcaactatcaaaaccgattcttgtggcaaagctttgattatccggtggacacattactcccggagatgaaaattggtcgggatctcaaaacaggacacgagactttcctcagttcttggagaagcccttatgatccctcaagcggagacttctcgttcaaactcggaactcaagggctacctgagttttatcttttcaagaaagagtttctattgtaccgatccggtccgtggaatggagtcgggtttagtggcataccgacgatgcaaaactggagctactttgacgttgttaacaacttcatagagaacagaggggaagttgcttatagtttcaaagtcaccgaccatagcatgcactacgtgagatttacactgactaccgaaagattattacagatatccagatgggatacgacatcatcggaatggaacttgtttggcgttttaccgaccgagaaatgcgatttgtaccaaatatgtggtcgtgatagttattgtgacacgaaaacatcaccgacgtgtaactgtatcaaaggctttgttccaaagaatgtgacggcttgggctttgggagatacatttgagggatgtgtgaggaagtcacgactgaactgccacagagatgggttttttcttttgatgaagaggatgaagctgcctggtacaagcacagcaattgtggacaagacaattgggttgaatgaatgtaaggagaggtgttctaaggattgtaattgtaccgggtttgcgaataaggatatccaaaatggtgggtcgggttgtgtgatttggaccggaggagctcatggatatgaggaattacgtcgtcggaggtcaagatctatatgtcaaaataggcctctataattagacatgaaaattggatatcttgatatatttttagaat

SEQ ID NO: 32693 - protein, 446 aa, Arabidopsis thaliana
  misc_feature (1)..(446): Ceres Seq. ID no. 13600778
IRKKVVKMRGVTPNYYHSYTFFFFFFVVLLALFLHVFSINTLSSTETLTISSNRTIVSPGNIFELGFFKTTTSSRNGDHWYLGIWYKSISERTYVWVANRDNPLSKSIGTLKISYANLVLLDHSGTLVWSTNLTRTVKSPVVAELLDNGNFVLRDSKGNYQNRFLWQSFDYPVDTLLPEMKIGRDLKTGHETFLSSWRSPYDPSSGDFSFKLGTQGLPEFYLFKKEFLLYRSGPWNGVGFSGIPTMQNWSYFDVVNNFIENRGEVAYSFKVTDHSMHYVRFTLTTERLLQISRWDTTSSEWNLFGVLPTEKCDLYQICGRDSYCDTKTSPTCNCIKGFVPKNVTAWALGDTFEGCVRKSRLNCHRDGFFLLMKRMKLPGTSTAIVDKTIGLNECKERCSKDCNCTGFANKDIQNGGSGCVIWTGGAHGYEELRRRRSRSICQNRPL

SEQ ID NO: 32694 - protein, 439 aa, Arabidopsis thaliana
  misc_feature (1)..(439): Ceres Seq. ID no. 13600779
MRGVTPNYYHSYTFFFFFFVVLLALFLHVFSINTLSSTETLTISSNRTIVSPGNIFELGFFKTTTSSRNGDHWYLGIWYKSISERTYVWVANRDNPLSKSIGTLKISYANLVLLDHSGTLVWSTNLTRTVKSPVVAELLDNGNFVLRDSKGNYQNRFLWQSFDYPVDTLLPEMKIGRDLKTGHETFLSSWRSPYDPSSGDFSFKLGTQGLPEFYLFKKEFLLYRSGPWNGVGFSGIPTMQNWSYFDVVNNFIENRGEVAYSFKVTDHSMHYVRFTLTTERLLQISRWDTTSSEWNLFGVLPTEKCDLYQICGRDSYCDTKTSPTCNCIKGFVPKNVTAWALGDTFEGCVRKSRLNCHRDGFFLLMKRMKLPGTSTAIVDKTIGLNECKERCSKDCNCTGFANKDIQNGGSGCVIWTGGAHGYEELRRRRSRSICQNRPL

SEQ ID NO: 32695 - protein, 267 aa, Arabidopsis thaliana
  misc_feature (1)..(267): Ceres Seq. ID no. 13600780
MKIGRDLKTGHETFLSSWRSPYDPSSGDFSFKLGTQGLPEFYLFKKEFLLYRSGPWNGVGFSGIPTMQNWSYFDVVNNFIENRGEVAYSFKVTDHSMHYVRFTLTTERLLQISRWDTTSSEWNLFGVLPTEKCDLYQICGRDSYCDTKTSPTCNCIKGFVPKNVTAWALGDTFEGCVRKSRLNCHRDGFFLLMKRMKLPGTSTAIVDKTIGLNECKERCSKDCNCTGFANKDIQNGGSGCVIWTGGAHGYEELRRRRSRSICQNRPL

SEQ ID NO: 32696 - DNA, 5118 bp, Arabidopsis thaliana
  misc_feature (1)..(5118): Ceres Seq. ID no. 13600785
atggcggctgctaacgcgcccatcattatgaaggaggtcctaacgcttccgagcgttgggatcggtcaacagttcatcacctttacaaatgttactatggagtctgataagtacatatgtgtacgagagacggcaccgcagaacagtgttgtaattatcgatatgaatatgccgatgcagcctttaaggaggcctataactgctgattctgctcttatgaacccaaactcgaggatccttgccttaaaagctcaagttccaggaactactcaggatcatctacagatatttaacattgaagcaaaggcaaagttgaagtcacatcagatgcctgagcaggttgctttttggaagtggatcacacctaagatgctgggactggtcacacaaacttctgtgtatcattggtcaattgaaggtgattctgagccagttaagatgtttgatagaacggctaatttggcaaacaatcaaattataaactataagtgctctcctaatgagaagtggttggtcttgattggaattgcccctggctctcctgagagaccacaattggtgaaaggaaatatgcagcttttctctgtggatcaacagcggagccaggcccttgaagcacatgctgcatcttttgctcagtttaaggtccctgggaatgagaatccttcgattcttatatcatttgcaagcaagagctttaatgctgggcagataacatcaaagctgcatgttattgaacttggtgcccaaccagggaaaccatcatttacaaaaaagcaggcagatctctttttccccccagattttgctgatgattttcctgtggccatgcaggtctctcacaagtttaacttgatttatgtcatcaccaagcttggcctgctgtttgtatatgatctagagacagcttctgctatctacagaaatcggataagtccggacccaattttcttaacgtctgaagcttcctcagttgggggtttctatgccattaataggcgaggacaagttcttttggcaacagtaaatgaggccaccataataccttttattagtggtcaattgaacaatttggaacttgctgtcaatcttgctaaaagaggaaacctccctggtgcagaaaatctggttgtccagcggttccaagagttatttgctcaaacaaagtacaaggaggctgctgagcttgctgctgaatctcctcagggcattctacggacacctgatacggtggccaaattccagagtgttcctgtacaagcagggcaaactcctccattgttacagtattttgggacccttttgactagagggaagctcaattcatatgagtctttggaactatctcggcttgttgtgaatcaaaacaaaaagaacctcttggaaaactggttggcagaggataagttagaatgcagtgaagaactcggagaccttgtcaaaactgtggataatgaccttgctctaaaaatatacatcaaagctagagctactccaaaagtcgttgcagcttttgcagagcgaagggagtttgacaaaatattgatttattcaaagcaggttgggtacacacctgattacatgtttcttctgcaaacgatactccgtacggatcctcagggagcagtaaattttgctttaatgatgtcccaaatggaaggaggttgtccagttgactacaacactatcactgatcttttccttcagagaaatctgatccgtgaagcgactgctttccttctggatgttctgaagccaaatttacccgagcatgcttttctgcaaactaaggttttggagatcaatttggtaacctttcctaatgtggctgatgcaatcttagcaaatgggatgttcagccattatgaccggcctcgtgttgctcagctttgtgaaaaggctggactttacatccaatctttaaagcattactcagagttacctgatatcaaacgtgtaattgtgaacacacatgctattgagccacaggctcttgtcgagttttttggtactctttctagcgagtgggcaatggagtgcatgaaagatctcctgttggtcaacctgagaggcaaccttcagataatcgttcaggtatgtgctgagtactgtgagcaacttggtgttgatgcatgcattaaactctttgagcaattcaagtcgtacgaagggctgtactttttcctaggttcatacttgagtatgagtgaggatcctgagattcacttcaagtacatcgaagcagctgccaagactggtcaaataaaggaggttgagcgtgtgactagagagtctaacttttatgatgcggaaaagacgaagaactttttaatggaagctaagcttcctgatgcccgacctttgattaatgtctgtgatcgttttggctttgtacctgatcttactcattacctctacacaaacaacatgctgcgttacattgaaggttacgttcagaaggtgaatcctgggaatgctcccttagttgtggggcagttgcttgatgacgaatgccctgaagattttataaaaggcctcattctttctgttcgttcattacttcctgttgaaccccttgttgcagaatgtgaaaagagaaatcgactccgtctcctcactcagttcttggagcatctagttagtgagggaagccaagatgtgcatgtccataatgccttgggtaaaattatcatagacagtaacaacaaccccgagcatttcctgaccaccaatccttactacgactctaaggttgtgggtaagtactgcgagaaacgtgatcccactctggctgttgtggcatacagaagaggacaatgtgacgaggaactcatcaatgtcaccaacaagaactctttgttcaagttacaagccaggtacgtagtggagaggatggatggtgacctctgggagaaggttcttacggaagaaaatgaatataggaggcaacttatagaccaagttgtgtctactgctttaccagaaagcaagagcccagagcaagtttctgcagctgttaaagcattcatgactgctgatttgccacatgagctaattgagcttctggaaaaaattgtgcttcaaaattctgccttcagtggaaatttcaatctgcaaaatctacttatactgacagctattaaggcagatccgtccagagttatggattacattaacaggctggataatttcgatggtccagctgttggagaagtggcagtggatgctcaattgtatgaggaagcatttgcgattttcaagaagtttaacttaaatgttcaggctgtcaacgtattgttggataacgtcagaagcattgaacgtgctgttgagtttgctttccgggtcgaagaagatgctgtttggagtcaagtcgctaaggcacagctcagggaaggactagtcagtgatgctattgagtcctttatccgagctgatgacaccactcagttcttggaggtcatccgagcctctgaagatactaatgtctatgatgacttggtcagataccttctgatggttagacagaaggtgaaggaacccaaggtggatagtgagctcatctatgcttatgcaaagattgaaaggttgggtgagattgaagaatttattctgatgcccaacgttgccaaccttcaacatgttggtgaccgtttgtacgatgaagctctgtatgaggctgcaaagataatatatgcattcatatcgaattgggccaagttagccgtcacccttgtgaagttgcaacagttccaaggtgctgttgatgctgcaaggaaagcaaacagtgcaaagacatggaaggaagtctgctttgcttgtgttgatgctgaggaattccgactggctcaaatctgtggacttaacattatcatacaggtggatgacctggaagaagtaagcgagtactaccagaacagaggatgcttcaatgaattgatctcccttatggagagtggacttggtctggaacgtgctcacatgggtatcttcaccgagttaggagtactgtacgccagatatcgttatgagaagcttatggaacacatcaagttgttctctactcgactcaatattcccaagcttatccgggcctgtgatgaacaacagcattggcaggaacttacctatctttacattcaatatgatgagtttgataatgctgcaaccactgttatgaatcattctcctgaagcatgggagcacatgcaattcaaagacattgttgccaaggttgcgaatgttgagctttactataaggccgttcacttctacttgcaagagcaccctgatataatcaacgatcttctcaatgtgcttgctctgcggttagatcacacgcgtgtcgttgatattatgcgcaaggctggtcacttgcgccttattaagccatatatggttgcagttcagagcaataatgtatctgctgtaaatgaagctctgaatgagatatatgcagaagaagaagactatgacaggttgcgcgagtctattgatttgcatgacagttttgaccagataggtctcgctcagaagattgagaaacacgagcttgttgaaatgagacgtgtggctgcttatatctataagaaagctggtagatggaagcaatcgattgctttgtcaaagaaagataacatgtacaaggactgtatggaaactgcttcgcaatccggcgaccatgatcttgcagaacaacttctcgtctacttcattgaacaggggaaaaaggaatgctttgctacatgtctctttgtctgttatgacttaatccgaccagacgttgctctagaacttgcttggatcaacaatatgatcgactttgccttcccgtatctcctccagtttatccgagaatactccggcaaagtggatgagctaatcaaggacaagctggaggcacaaaaagaggtgaaggccaaagaacaggaagagaaggatgtcatgtcacaacagaacatgtacgcccaattattaccactggctctacccgcaccaccgatgccaggaatgggaggtggcgggtatggtccaccaccacaaatgggtggaatgccaggaatgtcaggaatgcctccaatgcctccatatggaatgccaccgatgggcggctactaa

SEQ ID NO: 32697 - protein, 1705 aa, Arabidopsis thaliana
  misc_feature (1)..(1705): Ceres Seq. ID no. 13600786
MAAANAPIIMKEVLTLPSVGIGQQFITFTNVTMESDKYICVRETAPQNSVVIIDMNMPMQPLRRPITADSALMNPNSRILALKAQVPGTTQDHLQIFNIEAKAKLKSHQMPEQVAFWKWITPKMLGLVTQTSVYHWSIEGDSEPVKMFDRTANLANNQIINYKCSPNEKWLVLIGIAPGSPERPQLVKGNMQLFSVDQQRSQALEAHAASFAQFKVPGNENPSILISFASKSFNAGQITSKLHVIELGAQPGKPSFTKKQADLFFPPDFADDFPVAMQVSHKFNLIYVITKLGLLFVYDLETASAIYRNRISPDPIFLTSEASSVGGFYAINRRGQVLLATVNEATIIPFISGQLNNLELAVNLAKRGNLPGAENLVVQRFQELFAQTKYKEAAELAAESPQGILRTPDTVAKFQSVPVQAGQTPPLLQYFGTLLTRGKLNSYESLELSRLVVNQNKKNLLENWLAEDKLECSEELGDLVKTVDNDLALKIYIKARATPKVVAAFAERREFDKILIYSKQVGYTPDYMFLLQTILRTDPQGAVNFALMMSQMEGGCPVDYNTITDLFLQRNLIREATAFLLDVLKPNLPEHAFLQTKVLEINLVTFPNVADAILANGMFSHYDRPRVAQLCEKAGLYIQSLKHYSELPDIKRVIVNTHAIEPQALVEFFGTLSSEWAMECMKDLLLVNLRGNLQIIVQVCAEYCEQLGVDACIKLFEQFKSYEGLYFFLGSYLSMSEDPEIHFKYIEAAAKTGQIKEVERVTRESNFYDAEKTKNFLMEAKLPDARPLINVCDRFGFVPDLTHYLYTNNMLRYIEGYVQKVNPGNAPLVVGQLLDDECPEDFIKGLILSVRSLLPVEPLVAECEKRNRLRLLTQFLEHLVSEGSQDVHVHNALGKIIIDSNNNPEHFLTTNPYYDSKVVGKYCEKRDPTLAVVAYRRGQCDEELINVTNKNSLFKLQARYVVERMDGDLWEKVLTEENEYRRQLIDQVVSTALPESKSPEQVSAAVKAFMTADLPHELIELLEKIVLQNSAFSGNFNLQNLLILTAIKADPSRVMDYINRLDNFDGPAVGEVAVDAQLYEEAFAIFKKFNLNVQAVNVLLDNVRSIERAVEFAFRVEEDAVWSQVAKAQLREGLVSDAIESFIRADDTTQFLEVIRASEDTNVYDDLVRYLLMVRQKVKEPKVDSELIYAYAKIERLGEIEEFILMPNVANLQHVGDRLYDEALYEAAKIIYAFISNWAKLAVTLVKLQQFQGAVDAARKANSAKTWKEVCFACVDAEEFRLAQICGLNIIIQVDDLEEVSEYYQNRGCFNELISLMESGLGLERAHMGIFTELGVLYARYRYEKLMEHIKLFSTRLNIPKLIRACDEQQHWQELTYLYIQYDEFDNAATTVMNHSPEAWEHMQFKDIVAKVANVELYYKAVHFYLQEHPDIINDLLNVLALRLDHTRVVDIMRKAGHLRLIKPYMVAVQSNNVSAVNEALNEIYAEEEDYDRLRESIDLHDSFDQIGLAQKIEKHELVEMRRVAAYIYKKAGRWKQSIALSKKDNMYKDCMETASQSGDHDLAEQLLVYFIEQGKKECFATCLFVCYDLIRPDVALELAWINNMIDFAFPYLLQFIREYSGKVDELIKDKLEAQKEVKAKEQEEKDVMSQQNMYAQLLPLALPAPPMPGMGGGGYGPPPQMGGMPGMSGMPPMPPYGMPPMGGY

SEQ ID NO: 32698 - protein, 1696 aa, Arabidopsis thaliana
  misc_feature (1)..(1696): Ceres Seq. ID no. 13600787
MKEVLTLPSVGIGQQFITFTNVTMESDKYICVRETAPQNSVVIIDMNMPMQPLRRPITADSALMNPNSRILALKAQVPGTTQDHLQIFNIEAKAKLKSHQMPEQVAFWKWITPKMLGLVTQTSVYHWSIEGDSEPVKMFDRTANLANNQIINYKCSPNEKWLVLIGIAPGSPERPQLVKGNMQLFSVDQQRSQALEAHAASFAQFKVPGNENPSILISFASKSFNAGQITSKLHVIELGAQPGKPSFTKKQADLFFPPDFADDFPVAMQVSHKFNLIYVITKLGLLFVYDLETASAIYRNRISPDPIFLTSEASSVGGFYAINRRGQVLLATVNEATIIPFISGQLNNLELAVNLAKRGNLPGAENLVVQRFQELFAQTKYKEAAELAAESPQGILRTPDTVAKFQSVPVQAGQTPPLLQYFGTLLTRGKLNSYESLELSRLVVNQNKKNLLENWLAEDKLECSEELGDLVKTVDNDLALKIYIKARATPKVVAAFAERREFDKILIYSKQVGYTPDYMFLLQTILRTDPQGAVNFALMMSQMEGGCPVDYNTITDLFLQRNLIREATAFLLDVLKPNLPEHAFLQTKVLEINLVTFPNVADAILANGMFSHYDRPRVAQLCEKAGLYIQSLKHYSELPDIKRVIVNTHAIEPQALVEFFGTLSSEWAMECMKDLLLVNLRGNLQIIVQVCAEYCEQLGVDACIKLFEQFKSYEGLYFFLGSYLSMSEDPEIHFKYIEAAAKTGQIKEVERVTRESNFYDAEKTKNFLMEAKLPDARPLINVCDRFGFVPDLTHYLYTNNMLRYIEGYVQKVNPGNAPLVVGQLLDDECPEDFIKGLILSVRSLLPVEPLVAECEKRNRLRLLTQFLEHLVSEGSQDVHVHNALGKIIIDSNNNPEHFLTTNPYYDSKVVGKYCEKRDPTLAVVAYRRGQCDEELINVTNKNSLFKLQARYVVERMDGDLWEKVLTEENEYRRQLIDQVVSTALPESKSPEQVSAAVKAFMTADLPHELIELLEKIVLQNSAFSGNFNLQNLLILTAIKADPSRVMDYINRLDNFDGPAVGEVAVDAQLYEEAFAIFKKFNLNVQAVNVLLDNVRSIERAVEFAFRVEEDAVWSQVAKAQLREGLVSDAIESFIRADDTTQFLEVIRASEDTNVYDDLVRYLLMVRQKVKEPKVDSELIYAYAKIERLGEIEEFILMPNVANLQHVGDRLYDEALYEAAKIIYAFISNWAKLAVTLVKLQQFQGAVDAARKANSAKTWKEVCFACVDAEEFRLAQICGLNIIIQVDDLEEVSEYYQNRGCFNELISLMESGLGLERAHMGIFTELGVLYARYRYEKLMEHIKLFSTRLNIPKLIRACDEQQHWQELTYLYIQYDEFDNAATTVMNHSPEAWEHMQFKDIVAKVANVELYYKAVHFYLQEHPDIINDLLNVLALRLDHTRVVDIMRKAGHLRLIKPYMVAVQSNNVSAVNEALNEIYAEEEDYDRLRESIDLHDSFDQIGLAQKIEKHELVEMRRVAAYIYKKAGRWKQSIALSKKDNMYKDCMETASQSGDHDLAEQLLVYFIEQGKKECFATCLFVCYDLIRPDVALELAWINNMIDFAFPYLLQFIREYSGKVDELIKDKLEAQKEVKAKEQEEKDVMSQQNMYAQLLPLALPAPPMPGMGGGGYGPPPQMGGMPGMSGMPPMPPYGMPPMGGY

SEQ ID NO: 32699 - protein, 1673 aa, Arabidopsis thaliana
  misc_feature (1)..(1673): Ceres Seq. ID no. 13600788
MESDKYICVRETAPQNSVVIIDMNMPMQPLRRPITADSALMNPNSRILALKAQVPGTTQDHLQIFNIEAKAKLKSHQMPEQVAFWKWITPKMLGLVTQTSVYHWSIEGDSEPVKMFDRTANLANNQIINYKCSPNEKWLVLIGIAPGSPERPQLVKGNMQLFSVDQQRSQALEAHAASFAQFKVPGNENPSILISFASKSFNAGQITSKLHVIELGAQPGKPSFTKKQADLFFPPDFADDFPVAMQVSHKFNLIYVITKLGLLFVYDLETASAIYRNRISPDPIFLTSEASSVGGFYAINRRGQVLLATVNEATIIPFISGQLNNLELAVNLAKRGNLPGAENLVVQRFQELFAQTKYKEAAELAAESPQGILRTPDTVAKFQSVPVQAGQTPPLLQYFGTLLTRGKLNSYESLELSRLVVNQNKKNLLENWLAEDKLECSEELGDLVKTVDNDLALKIYIKARATPKVVAAFAERREFDKILIYSKQVGYTPDYMFLLQTILRTDPQGAVNFALMMSQMEGGCPVDYNTITDLFLQRNLIREATAFLLDVLKPNLPEHAFLQTKVLEINLVTFPNVADAILANGMFSHYDRPRVAQLCEKAGLYIQSLKHYSELPDIKRVIVNTHAIEPQALVEFFGTLSSEWAMECMKDLLLVNLRGNLQIIVQVCAEYCEQLGVDACIKLFEQFKSYEGLYFFLGSYLSMSEDPEIHFKYIEAAAKTGQIKEVERVTRESNFYDAEKTKNFLMEAKLPDARPLINVCDRFGFVPDLTHYLYTNNMLRYIEGYVQKVNPGNAPLVVGQLLDDECPEDFIKGLILSVRSLLPVEPLVAECEKRNRLRLLTQFLEHLVSEGSQDVHVHNALGKIIIDSNNNPEHFLTTNPYYDSKVVGKYCEKRDPTLAVVAYRRGQCDEELINVTNKNSLFKLQARYVVERMDGDLWEKVLTEENEYRRQLIDQVVSTALPESKSPEQVSAAVKAFMTADLPHELIELLEKIVLQNSAFSGNFNLQNLLILTAIKADPSRVMDYINRLDNFDGPAVGEVAVDAQLYEEAFAIFKKFNLNVQAVNVLLDNVRSIERAVEFAFRVEEDAVWSQVAKAQLREGLVSDAIESFIRADDTTQFLEVIRASEDTNVYDDLVRYLLMVRQKVKEPKVDSELIYAYAKIERLGEIEEFILMPNVANLQHVGDRLYDEALYEAAKIIYAFISNWAKLAVTLVKLQQFQGAVDAARKANSAKTWKEVCFACVDAEEFRLAQICGLNIIIQVDDLEEVSEYYQNRGCFNELISLMESGLGLERAHMGIFTELGVLYARYRYEKLMEHIKLFSTRLNIPKLIRACDEQQHWQELTYLYIQYDEFDNAATTVMNHSPEAWEHMQFKDIVAKVANVELYYKAVHFYLQEHPDIINDLLNVLALRLDHTRVVDIMRKAGHLRLIKPYMVAVQSNNVSAVNEALNEIYAEEEDYDRLRESIDLHDSFDQIGLAQKIEKHELVEMRRVAAYIYKKAGRWKQSIALSKKDNMYKDCMETASQSGDHDLAEQLLVYFIEQGKKECFATCLFVCYDLIRPDVALELAWINNMIDFAFPYLLQFIREYSGKVDELIKDKLEAQKEVKAKEQEEKDVMSQQNMYAQLLPLALPAPPMPGMGGGGYGPPPQMGGMPGMSGMPPMPPYGMPPMGGY

SEQ ID NO: 32700 - DNA, 1779 bp, Arabidopsis thaliana
  misc_feature (1)..(1779): Ceres Seq. ID no. 13600793
cactagtcccccccccccccgactaatccctaaatcacgagagaagtgagagacactgagactttgtagttgaccggatcattctcacttcgccggccgacgttcttccttccgccgtcggtatctatatttacgatccacgatctctcttgctgtttctgtcttcatcgtgacgaacatggctgctcgtatcgggatcttctccgtcttcgtagctgtattgttatctatttctgcattttcctcagctcaggatctccagatcgtaaatgccgagcgaaggattgatttaagctcacatatcgtgaaggccttcttgactctcaaggttgaaaatattgggaaagatcctgctgcagaaatgcttcttgctttcccacctacccagatcaagaatttggctatggtacaagccctggcaattactggcaagaagaagaagaaaacttatttgccattagatgtaaaaccaactgaacaacctgatgcaccgaatgacactggatactaccgtgttacgtttattagccccttaggtccgggtgaaactgtttcacttgaggtgctttacatattgactcattccttggaacctttcccagtggagataacccagtcagaatctcaattggtttactatcatgatagtgcagtgatattgtcaccgtatcatgttaagcaacagacaacttttattaagactcctagtactagagtagagtcgttcactagcattgaacctgctaaccgggctggcaaagagatcaaatatggaccatatgaaaatcgtgcttcatactcttacacacctgtcatcattcacttcgagaataacagtccatttgctgttgttgaggagcttgtgcgtgaaattgagatttcacactggggtagccttcagattacagaaaattataggttgactcatgggggagcgaggcataagggtgttttctcaagggttgattatcaatctaaacgatcggtcagtggtgcatcctctttcaatgcgctccttgcagtactacctcccagagtgaactctgtctactacagggatgagataggaaacatctctacttcacatttgcgtacaggctttagaaagtcagaacttgaatttgaaccccgctacccattatttggagggtggagtgcaacttttatcatcggctatagagttccattggaagactatctctttgaagcatctgatggcagacgttacttgaactttacctttgggtgcccgctcgtcgaaactattgttaacaagttgactatcaaagtcgtgcttcctgaaggatcaaaggacccttctgctgttttgccctttacagtcaatcaagagttgcaggtcaaatactcataccttgacatagtgggaagaaccgtggttgtgttgcaaaaagataacgtagttcccactcacaacgtacccttccaggtgtactatacattcaaaccaatatacatgcttgcggaaccattcatgcttgtatcggctttcttcttagtatttgtggcttcgcttgcgtatgtacacattgacctcaatatcgtcaggaagtagaagtcttatcaacagtcctttgctttcacttatagactcgttaaagaatacacttttgatcatcacttgaagaactaaactttgtaggtgttgctgcttttagtagagttatatctttgacactaaaaaaaaaaaaaaaaaaaactcgagggggggcccggtacccaattcgtgttaaacacaataaagttggaactggagggggg

SEQ ID NO: 32701 - protein, 464 aa, Arabidopsis thaliana
  misc_feature (1)..(464): Ceres Seq. ID no. 15219006
MAARIGIFSVFVAVLLSISAFSSAQDLQIVNAERRIDLSSHIVKAFLTLKVENIGKDPAAEMLLAFPPTQIKNLAMVQALAITGKKKKKTYLPLDVKPTEQPDAPNDTGYYRVTFISPLGPGETVSLEVLYILTHSLEPFPVEITQSESQLVYYHDSAVILSPYHVKQQTTFIKTPSTRVESFTSIEPANRAGKEIKYGPYENRASYSYTPVIIHFENNSPFAVVEELVREIEISHWGSLQITENYRLTHGGARHKGVFSRVDYQSKRSVSGASSFNALLAVLPPRVNSVYYRDEIGNISTSHLRTGFRKSELEFEPRYPLFGGWSATFIIGYRVPLEDYLFEASDGRRYLNFTFGCPLVETIVNKLTIKVVLPEGSKDPSAVLPFTVNQELQVKYSYLDIVGRTVVVLQKDNVVPTHNVPFQVYYTFKPIYMLAEPFMLVSAFFLVFVASLAYVHIDLNIVRK

SEQ ID NO: 32702 - protein, 403 aa, Arabidopsis thaliana
  misc_feature (1)..(403): Ceres Seq. ID no. 15219007
MLLAFPPTQIKNLAMVQALAITGKKKKKTYLPLDVKPTEQPDAPNDTGYYRVTFISPLGPGETVSLEVLYILTHSLEPFPVEITQSESQLVYYHDSAVILSPYHVKQQTTFIKTPSTRVESFTSIEPANRAGKEIKYGPYENRASYSYTPVIIHFENNSPFAVVEELVREIEISHWGSLQITENYRLTHGGARHKGVFSRVDYQSKRSVSGASSFNALLAVLPPRVNSVYYRDEIGNISTSHLRTGFRKSELEFEPRYPLFGGWSATFIIGYRVPLEDYLFEASDGRRYLNFTFGCPLVETIVNKLTIKVVLPEGSKDPSAVLPFTVNQELQVKYSYLDIVGRTVVVLQKDNVVPTHNVPFQVYYTFKPIYMLAEPFMLVSAFFLVFVASLAYVHIDLNIVRK

SEQ ID NO: 32703 - protein, 389 aa, Arabidopsis thaliana
  misc_feature (1)..(389): Ceres Seq. ID no. 15219008
MVQALAITGKKKKKTYLPLDVKPTEQPDAPNDTGYYRVTFISPLGPGETVSLEVLYILTHSLEPFPVEITQSESQLVYYHDSAVILSPYHVKQQTTFIKTPSTRVESFTSIEPANRAGKEIKYGPYENRASYSYTPVIIHFENNSPFAVVEELVREIEISHWGSLQITENYRLTHGGARHKGVFSRVDYQSKRSVSGASSFNALLAVLPPRVNSVYYRDEIGNISTSHLRTGFRKSELEFEPRYPLFGGWSATFIIGYRVPLEDYLFEASDGRRYLNFTFGCPLVETIVNKLTIKVVLPEGSKDPSAVLPFTVNQELQVKYSYLDIVGRTVVVLQKDNVVPTHNVPFQVYYTFKPIYMLAEPFMLVSAFFLVFVASLAYVHIDLNIVRK

SEQ ID NO: 32704 - DNA, 2104 bp, Arabidopsis thaliana
  misc_feature (1)..(2104): Ceres Seq. ID no. 13600798
atggaatctggtttctccggcggtggtggtgggtcggatttttacggcggtggtggtggtagatctatacctggaggtccaggaactgttatcaacgtcggtaacaataatcctcagacgacgtatagaaaccagattcctggaatcttctttgatcagatcggaaacagagtcgccggcggtaatggattctccgggaaaaggactttagcagattttcaagcggctcagcaacatcaacaacaacaacaacaacaaccgttttatagtcaagcagctctcaacgcttttctttcaaggtctgtgaagcctcgaaattatcagaattttcaatctccgtcgccgatgattgatctcacgtcggtgaatgatatgagtttgtttggtggttctggttcatctcagcgttacggtttaccggttcccaggtctcagacgcaacagcaacaatcggattacggtttatttggtgggatccgaatgggaatcgggtcgggtattaataattatccaacattaaccggcgttccgtgtattgaaccggttcaaaaccgggttcatgaatcggagaacatgttgaatagtttaagagagcttgagaaacagcttttagatgatgacgatgagagtggtggtgatgatgacgtgtcagttataacaaattcaaattccgattggattcaaaatctcgtgactccgaacccgaacccgaacccggttttgtctttttcaccgagctcttcttcttcgtcttcttcgccttctacagcttcgacgacgacatcggtatgttctaggcaaacggttatggaaatcgcgacggcgatcgcggaagggaaaacagagatagcgacggagattttggcgcgtgtttctcaaacgcctaatcttgagaggaattcagaggagaagcttgttgatttcatggtggctgcgcttcgatcgaggatagcttctccagtgacggaattgtatgggaaggagcatttaatctcgactcaattgctctacgagctctctccttgtttcaaactcggtttcgaggccgcgaatctcgccattctcgacgccgccgataacaacgacggtggaatgatgataccgcacgttatcgatttcgatatcggagaaggtggacaatacgttaaccttctccgtacattatccacgcgccggaatggtaaaagtcagagtcagaattctccggtggttaagatcaccgccgtggcgaacaacgtttacggatgtttagtcgatgacggtggagaagagaggttaaaagccgtcggagatttgttgagccaactcggtgatcgactcggtatctccgtaagtttcaacgtggtgacgagtttacgactcggtgatctgaatcgtgaatctctcgggtgtgatcccgacgagactttggctgtgaacttagctttcaagctttatcgtgttcccgacgaaagcgtatgcacggagaatccaagagacgaacttctccggcgcgtgaagggacttaaaccgcgcgtggttactctagtggagcaagaaatgaattcgaatacggcgccgtttttagggagagtgagtgagtcatgcgcgtgttacggtgcgttgcttgagtcggtcgagtctacggttcctagtacgaattccgaccgtgccaaagttgaggaaggaattggccggaagctagtaaacgcggtggcgtgcgaaggaatcgatcgtatagagcggtgcgaggtgttcgggaaatggcgaatgcggatgagcatggctgggtttgagttaatgccattgagtgagaagatagcggagtcgatgaagagtcgtggaaaccgagtccacccgggctttaccgttaaagaagataacggaggtgtgtgctttggttggatgggacgggcactcactgtcgcatccgcttggcgttaacttcacacactcttttttttcttcttattattaccatattattattattaattttcgagattattctgatattattatcattgtgattttccatttcgaaaagtgtaggaatcttatgtaacaaagaaaaaaaaaagacttttatgtttttctaataataaaagaaagagtgattgggttc

SEQ ID NO: 32705 - protein, 640 aa, Arabidopsis thaliana
  misc_feature (1)..(640): Ceres Seq. ID no. 13600799
MESGFSGGGGGSDFYGGGGGRSIPGGPGTVINVGNNNPQTTYRNQIPGIFFDQIGNRVAGGNGFSGKRTLADFQAAQQHQQQQQQQPFYSQAALNAFLSRSVKPRNYQNFQSPSPMIDLTSVNDMSLFGGSGSSQRYGLPVPRSQTQQQQSDYGLFGGIRMGIGSGINNYPTLTGVPCIEPVQNRVHESENMLNSLRELEKQLLDDDDESGGDDDVSVITNSNSDWIQNLVTPNPNPNPVLSFSPSSSSSSSSPSTASTTTSVCSRQTVMEIATAIAEGKTEIATEILARVSQTPNLERNSEEKLVDFMVAALRSRIASPVTELYGKEHLISTQLLYELSPCFKLGFEAANLAILDAADNNDGGMMIPHVIDFDIGEGGQYVNLLRTLSTRRNGKSQSQNSPVVKITAVANNVYGCLVDDGGEERLKAVGDLLSQLGDRLGISVSFNVVTSLRLGDLNRESLGCDPDETLAVNLAFKLYRVPDESVCTENPRDELLRRVKGLKPRVVTLVEQEMNSNTAPFLGRVSESCACYGALLESVESTVPSTNSDRAKVEEGIGRKLVNAVACEGIDRIERCEVFGKWRMRMSMAGFELMPLSEKIAESMKSRGNRVHPGFTVKEDNGGVCFGWMGRALTVASAWR

SEQ ID NO: 32706 - protein, 525 aa, Arabidopsis thaliana
  misc_feature (1)..(525): Ceres Seq. ID no. 13600800
MIDLTSVNDMSLFGGSGSSQRYGLPVPRSQTQQQQSDYGLFGGIRMGIGSGINNYPTLTGVPCIEPVQNRVHESENMLNSLRELEKQLLDDDDESGGDDDVSVITNSNSDWIQNLVTPNPNPNPVLSFSPSSSSSSSSPSTASTTTSVCSRQTVMEIATAIAEGKTEIATEILARVSQTPNLERNSEEKLVDFMVAALRSRIASPVTELYGKEHLISTQLLYELSPCFKLGFEAANLAILDAADNNDGGMMIPHVIDFDIGEGGQYVNLLRTLSTRRNGKSQSQNSPVVKITAVANNVYGCLVDDGGEERLKAVGDLLSQLGDRLGISVSFNVVTSLRLGDLNRESLGCDPDETLAVNLAFKLYRVPDESVCTENPRDELLRRVKGLKPRVVTLVEQEMNSNTAPFLGRVSESCACYGALLESVESTVPSTNSDRAKVEEGIGRKLVNAVACEGIDRIERCEVFGKWRMRMSMAGFELMPLSEKIAESMKSRGNRVHPGFTVKEDNGGVCFGWMGRALTVASAWR

SEQ ID NO: 32707 - protein, 516 aa, Arabidopsis thaliana
  misc_feature (1)..(516): Ceres Seq. ID no. 13600801
MSLFGGSGSSQRYGLPVPRSQTQQQQSDYGLFGGIRMGIGSGINNYPTLTGVPCIEPVQNRVHESENMLNSLRELEKQLLDDDDESGGDDDVSVITNSNSDWIQNLVTPNPNPNPVLSFSPSSSSSSSSPSTASTTTSVCSRQTVMEIATAIAEGKTEIATEILARVSQTPNLERNSEEKLVDFMVAALRSRIASPVTELYGKEHLISTQLLYELSPCFKLGFEAANLAILDAADNNDGGMMIPHVIDFDIGEGGQYVNLLRTLSTRRNGKSQSQNSPVVKITAVANNVYGCLVDDGGEERLKAVGDLLSQLGDRLGISVSFNVVTSLRLGDLNRESLGCDPDETLAVNLAFKLYRVPDESVCTENPRDELLRRVKGLKPRVVTLVEQEMNSNTAPFLGRVSESCACYGALLESVESTVPSTNSDRAKVEEGIGRKLVNAVACEGIDRIERCEVFGKWRMRMSMAGFELMPLSEKIAESMKSRGNRVHPGFTVKEDNGGVCFGWMGRALTVASAWR

SEQ ID NO: 32708 - DNA, 1230 bp, Arabidopsis thaliana
  misc_feature (1)..(1230): Ceres Seq. ID no. 13600802
agacacgcatagagagattgattattgcatcgaatcaagcttggtttgttagtaatggcgggaatagctttagttttagatctactgaagaaatctcaatctaagaacactctccactcatcttccttctattccgcctccgccgccgctgtttctgctgccgcctctgctccttttgcgtctaggtttctcttcggttcttttgagcctagagttgcgtattgtgatgctgctgctgcaatagatgatgattaccttggtgctatacggaaaatgtctgcggatgttttgcagcgtcaaccccttgcgtatatttctaggtccaaggaatacaatatccagccaaaaccagttctctcggcctttgagttcagggcacttgcaatgactacagtgagatcccttttgatgttttatttgcctcttttggagcctaaaacggcttcagaggatgatgatgatttcctaaacaatgctgcagaagaaaaccgccacacagacttgattgttcctcttaaaaagtcagcaaagcaaattgcccgtgagaccacagttgtgaccactcggagagtccttgaaaggctggctctgagttatgtctcacagcgtatggcatggaaacttctaaaggatgtgcctcagtcggctttacgcaaggctcagagagggttgccgacacatgtatatatctttaaagtcagccaaacaactcttagaggtcacttcctgggaatcgcagcatcatgggtagttcaagtaggcattgaaatctacagatgtgtgttcccgaatgttaaacccgaggaagaagaagaagaggagaaagtcgagatatcacagcaagctaaggatctcggaaacaaagttgtgggtatcacagtacgatgtggcgcgtccttagtatttgctgccattggagccgggatatgttcttgccttatccgtccctccacgggccaatggatcggttgcgcgctgggagacttggctggtccgatggttgtttcggtttgcctgcagaagactcttcaagctgattattaagttcttgtgtggaaattgaattcttctacttgaatcttgatgatccaaatgaaatcatagagcttgttttttgtttctgaaatttcttattgtcttcactgaaccttaaaaacaatgatcaatagatttctcaaaatgtacctacttttgacaacagcacaataagtcaggtatttattttcctcg

SEQ ID NO: 32709 - protein, 329 aa, Arabidopsis thaliana
  misc_feature (1)..(329): Ceres Seq. ID no. 13600803
MAGIALVLDLLKKSQSKNTLHSSSFYSASAAAVSAAASAPFASRFLFGSFEPRVAYCDAAAAIDDDYLGAIRKMSADVLQRQPLAYISRSKEYNIQPKPVLSAFEFRALAMTTVRSLLMFYLPLLEPKTASEDDDDFLNNAAEENRHTDLIVPLKKSAKQIARETTVVTTRRVLERLALSYVSQRMAWKLLKDVPQSALRKAQRGLPTHVYIFKVSQTTLRGHFLGIAASWVVQVGIEIYRCVFPNVKPEEEEEEEKVEISQQAKDLGNKVVGITVRCGASLVFAAIGAGICSCLIRPSTGQWIGCALGDLAGPMVVSVCLQKTLQADY

SEQ ID NO: 32710 - protein, 256 aa, Arabidopsis thaliana
  misc_feature (1)..(256): Ceres Seq. ID no. 13600804
MSADVLQRQPLAYISRSKEYNIQPKPVLSAFEFRALAMTTVRSLLMFYLPLLEPKTASEDDDDFLNNAAEENRHTDLIVPLKKSAKQIARETTVVTTRRVLERLALSYVSQRMAWKLLKDVPQSALRKAQRGLPTHVYIFKVSQTTLRGHFLGIAASWVVQVGIEIYRCVFPNVKPEEEEEEEKVEISQQAKDLGNKVVGITVRCGASLVFAAIGAGICSCLIRPSTGQWIGCALGDLAGPMVVSVCLQKTLQADY

SEQ ID NO: 32711 - protein, 219 aa, Arabidopsis thaliana
  misc_feature (1)..(219): Ceres Seq. ID no. 13600805
MTTVRSLLMFYLPLLEPKTASEDDDDFLNNAAEENRHTDLIVPLKKSAKQIARETTVVTTRRVLERLALSYVSQRMAWKLLKDVPQSALRKAQRGLPTHVYIFKVSQTTLRGHFLGIAASWVVQVGIEIYRCVFPNVKPEEEEEEEKVEISQQAKDLGNKVVGITVRCGASLVFAAIGAGICSCLIRPSTGQWIGCALGDLAGPMVVSVCLQKTLQADY

SEQ ID NO: 32712 - DNA, 3059 bp, Arabidopsis thaliana
  misc_feature (1)..(3059): Ceres Seq. ID no. 13600806
gatcatcaatcataaaaattaaaaaaataaggcctcgtcgctatatcttctctctagggttcgctgttgctttttcatcttcttcttctccttctctgtttctctgctttcgtcacgaaagggcgatatgtattgtttctcagtaggaagctcgttactctgattcgattcgattctcaatcctttcatcaaaccgttttgggacttcggattttcatattaagttttcaaagcagtcaattagggtttgtagactaattcggatttggagacggtagcggttatggacgcttttggaatcgggagtagtttaaatcaagctcccgtaactcaggatcttaagaaatttggagataattctacaggtaacacaatgtttgatgcatctcaatatgccttttttgggaacgatgttgtcgaggaggttgagctgggtggattggaagaagaagatgagattttgtctttcactggaatagcagaagacttttcatttgataaggaagaggttggagattctagacttctgtctgacgttgatgatcttgctagtactttttcaaagttgaatagggaacctgatgtgtatagtaatacggggccaatcactgataggcgatcaagtcagaattctttagctgctgagtggacccatggggaagagttaccaaattggtacggccggcaaatactggactctgatgccattaaagatgacaaggtgtggtcagcacagccattttcatctctggaccgtgttgagcagagaatccctgacagaacaaaattgtatccagaaccacaacgtcaactgcatcaagaccataatcaacaacagttttccaacgaaccaattcttgtcccgaagtcatcttttgtttcataccctcctccaggcagcatatcaccagatcagcgtttaggacaccctaatataccatatcaatctggtgggcctcaaatgggatcgccaaacttttctccttttccaaatttgcagcctcagttgcctagcatgcatcatggatcaccgcagcatactggaaacaggcctcagtttcgtcctgctcttcctctgaataatctccctccagctcaatggatgaatcgtcaaaatatgcatcctggggatagttccgggatcatgaataatgcgatgctacaacagcctcctcatcaaaacggtttgatgcctccacagatgcagggctctcagaataggttaccacatccgatgcagcctcctctcgggcatatgccaggaatgcagcctcagttatttaattcccatctttctcgatcatcatcctctggaaattatgatggaatgcttgggtttggtgatctgagggaagtaagaccaggatcaggtcatgggaacagacagaatgtgcgttttccccaacaaggctttgatgctggcgttcagagaagatatccattccggtctaaatatatgtcagctggtgagatagagaatatactgagaatgcagcttgttgctacacacagcaatgatccttatgttgatgattactatcaccaagcctgtcttgctaagaaatctgcaggtgcaaaactgaagcatcatttctgtccaaatcatttgagggaccttcaacagcgtgcacggtcgaacaacgagccccatgcttttcttcaggttgaggctcttggtagggttcctttctcttcaatccgcaggcctcgtcctctgcttgaagtggaccctccaaattcagctaaatttggtaatgcagagcataaacctacggataagccccttgatcaagagccgatgcttgcagctagagtgtacattgaggatggtctttgtctcctccttgaagttgatgatatagatcgtttcttggagtttaaccaactccaggacggaggacaccagttgaaacaaagacgacaagcattgttgcagagccttgcggtttcacttcagctcggtgatcccctcgccaagaatgggcaaagccagtctcttgatgattttctctttctaagggttatctctcttccaaagggtcgaaagctacttataaggtatcttcagctaattttccctggcagcgacctaatgcggatagtttgcatggccattttccgtcatttaaggtcattgttcggagtcctttcatctgaccccgatatcatcaaaaccacaaataagcttgcaacagttatcaacttgtgcattcaaaacatggagttaggaccggtaagcacgtgtctagcagcggtgtcttgttcttctgagcaggcaccgctccgccccttaggcagtcctgttggagacggagcttccacagtattgaaatcaatactcgacagagcttccgagcttatccgggctaataatttcaacaacgcagggatagctctatggcgcgcttcctttaatgagttctttaatatgttgatgaggtactgcatcagcaaatacgatagcatcatgcagagtttgcaattgccaccgcattttgccactgagatatctgaagaagctgcaaaagccattgtccgcgaaatgccaatagagcttctacgttcaagtttcccacacattgatgagcagcaaaagaggatactgatggagtttttgaaacgatctatgctcggaagccagaaaaccgagccagtattaagttgataggatgaagattgaaacagtaaaatcaaagaaactgtatggtgaagtctgtatatgaaggcataaagatcacgcagataccgcgggaagaaaggtagagagaatcgattcaaactatttctatttgcatcagagagttaggattcttccttcaaatggacaatactggttttgtgtcttataggtaaaagcagtggagaagaagtttggtctctgtacagagaaaaaagtctttaggttttgcagaacttatgaagaggtttcaggcatttgtatttctgtcttttgtttagttgatctcattgtcgtttcgatatttgtttttgaaaccttgtttatgtttttgataaaagaaaaaaaaaaaaaaaaaaaactcgagggggggcccggtacc

SEQ ID NO: 32713 - protein, 793 aa, Arabidopsis thaliana
  misc_feature (1)..(793): Ceres Seq. ID no. 15219009
MDAFGIGSSLNQAPVTQDLKKFGDNSTGNTMFDASQYAFFGNDVVEEVELGGLEEEDEILSFTGIAEDFSFDKEEVGDSRLLSDVDDLASTFSKLNREPDVYSNTGPITDRRSSQNSLAAEWTHGEELPNWYGRQILDSDAIKDDKVWSAQPFSSLDRVEQRIPDRTKLYPEPQRQLHQDHNQQQFSNEPILVPKSSFVSYPPPGSISPDQRLGHPNIPYQSGGPQMGSPNFSPFPNLQPQLPSMHHGSPQHTGNRPQFRPALPLNNLPPAQWMNRQNMHPGDSSGIMNNAMLQQPPHQNGLMPPQMQGSQNRLPHPMQPPLGHMPGMQPQLFNSHLSRSSSSGNYDGMLGFGDLREVRPGSGHGNRQNVRFPQQGFDAGVQRRYPFRSKYMSAGEIENILRMQLVATHSNDPYVDDYYHQACLAKKSAGAKLKHHFCPNHLRDLQQRARSNNEPHAFLQVEALGRVPFSSIRRPRPLLEVDPPNSAKFGNAEHKPTDKPLDQEPMLAARVYIEDGLCLLLEVDDIDRFLEFNQLQDGGHQLKQRRQALLQSLAVSLQLGDPLAKNGQSQSLDDFLFLRVISLPKGRKLLIRYLQLIFPGSDLMRIVCMAIFRHLRSLFGVLSSDPDIIKTTNKLATVINLCIQNMELGPVSTCLAAVSCSSEQAPLRPLGSPVGDGASTVLKSILDRASELIRANNFNNAGIALWRASFNEFFNMLMRYCISKYDSIMQSLQLPPHFATEISEEAAKAIVREMPIELLRSSFPHIDEQQKRILMEFLKRSMLGSQKTEPVLS

SEQ ID NO: 32714 - protein, 763 aa, Arabidopsis thaliana
  misc_feature (1)..(763): Ceres Seq. ID no. 15219010
MFDASQYAFFGNDVVEEVELGGLEEEDEILSFTGIAEDFSFDKEEVGDSRLLSDVDDLASTFSKLNREPDVYSNTGPITDRRSSQNSLAAEWTHGEELPNWYGRQILDSDAIKDDKVWSAQPFSSLDRVEQRIPDRTKLYPEPQRQLHQDHNQQQFSNEPILVPKSSFVSYPPPGSISPDQRLGHPNIPYQSGGPQMGSPNFSPFPNLQPQLPSMHHGSPQHTGNRPQFRPALPLNNLPPAQWMNRQNMHPGDSSGIMNNAMLQQPPHQNGLMPPQMQGSQNRLPHPMQPPLGHMPGMQPQLFNSHLSRSSSSGNYDGMLGFGDLREVRPGSGHGNRQNVRFPQQGFDAGVQRRYPFRSKYMSAGEIENILRMQLVATHSNDPYVDDYYHQACLAKKSAGAKLKHHFCPNHLRDLQQRARSNNEPHAFLQVEALGRVPFSSIRRPRPLLEVDPPNSAKFGNAEHKPTDKPLDQEPMLAARVYIEDGLCLLLEVDDIDRFLEFNQLQDGGHQLKQRRQALLQSLAVSLQLGDPLAKNGQSQSLDDFLFLRVISLPKGRKLLIRYLQLIFPGSDLMRIVCMAIFRHLRSLFGVLSSDPDIIKTTNKLATVINLCIQNMELGPVSTCLAAVSCSSEQAPLRPLGSPVGDGASTVLKSILDRASELIRANNFNNAGIALWRASFNEFFNMLMRYCISKYDSIMQSLQLPPHFATEISEEAAKAIVREMPIELLRSSFPHIDEQQKRILMEFLKRSMLGSQKTEPVLS

SEQ ID NO: 32715 - protein, 567 aa, Arabidopsis thaliana
  misc_feature (1)..(567): Ceres Seq. ID no. 15219011
MGSPNFSPFPNLQPQLPSMHHGSPQHTGNRPQFRPALPLNNLPPAQWMNRQNMHPGDSSGIMNNAMLQQPPHQNGLMPPQMQGSQNRLPHPMQPPLGHMPGMQPQLFNSHLSRSSSSGNYDGMLGFGDLREVRPGSGHGNRQNVRFPQQGFDAGVQRRYPFRSKYMSAGEIENILRMQLVATHSNDPYVDDYYHQACLAKKSAGAKLKHHFCPNHLRDLQQRARSNNEPHAFLQVEALGRVPFSSIRRPRPLLEVDPPNSAKFGNAEHKPTDKPLDQEPMLAARVYIEDGLCLLLEVDDIDRFLEFNQLQDGGHQLKQRRQALLQSLAVSLQLGDPLAKNGQSQSLDDFLFLRVISLPKGRKLLIRYLQLIFPGSDLMRIVCMAIFRHLRSLFGVLSSDPDIIKTTNKLATVINLCIQNMELGPVSTCLAAVSCSSEQAPLRPLGSPVGDGASTVLKSILDRASELIRANNFNNAGIALWRASFNEFFNMLMRYCISKYDSIMQSLQLPPHFATEISEEAAKAIVREMPIELLRSSFPHIDEQQKRILMEFLKRSMLGSQKTEPVLS

SEQ ID NO: 32716 - DNA, 1109 bp, Arabidopsis thaliana
  misc_feature (1)..(1109): Ceres Seq. ID no. 13600811
aagttcgatttcctaattcctaatccgtttcctttttattccgatcaaagcagcgaaaaaagcatcggagatatgtcgtctaaggacaagaaactatcgaagccaacaagtggtcgtactggtggtatccgtacactttccgatctgaaccgaagatcagaacctgattccgatagtgactccgatggacctcaagaatacttcaccggtggcgaaaaaagtggtatgcttgttcaagatcctacaaaagaaccaaaacacgatgatgttgatgagatatttaatcaagcaagacagctaggagctgtggaaggacctcttgagcatccttcgagttctagaagctttacaggaacaggaagattgctttctggagaaagtgtgccaacggctcttcaacagcctgagcctgtgattcacaatattattttctggtctaatggattcactgtagatgatggacctttgaggaagttggatgatccagagaatgcttcttttcttgatagcattcgaaagtctgaatgtccgaaagagcttgagcctgttgataaaagagctcctgtacatgttaatcttatgagaagagatgagaagtgccctgagaaagaaaagcttaaggtttcatttcaaggagttggaaggactctaggtggtgcaagctcatcaacagcttcaagccaaagtaacctaactgatgtagcagcggttcaatcaccgttacagagccttgtagtagatgaaactcttccatccacatcgatccagcttagactcgcggatgggacacgcatggtagcaaagttcaacaaccatcacacggttaacgacattcgtggtttcattgagttttctcgaccagggaatccaaacaactatacccttcaggtcatggggttcccaccaaagccacttactgacccttctcagaccattgaacaagccggtctagcaagttctgtagtcattcagaaattctagaaaatttcgtttctctttttttgtactagagagagatttcaacaacttggaattgtactgaaaatattcaatcggcttattgttgtggcaagagaaataaaaacatcatatggtttctatgttgtttc

SEQ ID NO: 32717 - protein, 326 aa, Arabidopsis thaliana
  misc_feature (1)..(326): Ceres Seq. ID no. 13600812
KFDFLIPNPFPFYSDQSSEKSIGDMSSKDKKLSKPTSGRTGGIRTLSDLNRRSEPDSDSDSDGPQEYFTGGEKSGMLVQDPTKEPKHDDVDEIFNQARQLGAVEGPLEHPSSSRSFTGTGRLLSGESVPTALQQPEPVIHNIIFWSNGFTVDDGPLRKLDDPENASFLDSIRKSECPKELEPVDKRAPVHVNLMRRDEKCPEKEKLKVSFQGVGRTLGGASSSTASSQSNLTDVAAVQSPLQSLVVDETLPSTSIQLRLADGTRMVAKFNNHHTVNDIRGFIEFSRPGNPNNYTLQVMGFPPKPLTDPSQTIEQAGLASSVVIQKF

SEQ ID NO: 32718 - protein, 302 aa, Arabidopsis thaliana
  misc_feature (1)..(302): Ceres Seq. ID no. 13600813
MSSKDKKLSKPTSGRTGGIRTLSDLNRRSEPDSDSDSDGPQEYFTGGEKSGMLVQDPTKEPKHDDVDEIFNQARQLGAVEGPLEHPSSSRSFTGTGRLLSGESVPTALQQPEPVIHNIIFWSNGFTVDDGPLRKLDDPENASFLDSIRKSECPKELEPVDKRAPVHVNLMRRDEKCPEKEKLKVSFQGVGRTLGGASSSTASSQSNLTDVAAVQSPLQSLVVDETLPSTSIQLRLADGTRMVAKFNNHHTVNDIRGFIEFSRPGNPNNYTLQVMGFPPKPLTDPSQTIEQAGLASSVVIQKF

SEQ ID NO: 32719 - protein, 251 aa, Arabidopsis thaliana
  misc_feature (1)..(251): Ceres Seq. ID no. 13600814
MLVQDPTKEPKHDDVDEIFNQARQLGAVEGPLEHPSSSRSFTGTGRLLSGESVPTALQQPEPVIHNIIFWSNGFTVDDGPLRKLDDPENASFLDSIRKSECPKELEPVDKRAPVHVNLMRRDEKCPEKEKLKVSFQGVGRTLGGASSSTASSQSNLTDVAAVQSPLQSLVVDETLPSTSIQLRLADGTRMVAKFNNHHTVNDIRGFIEFSRPGNPNNYTLQVMGFPPKPLTDPSQTIEQAGLASSVVIQKF

SEQ ID NO: 32720 - DNA, 3725 bp, Arabidopsis thaliana
  misc_feature (1)..(3725): Ceres Seq. ID no. 13600823
atatccagataattaattctctcataatatcttctccacaatttcaactcttctaaagtctaaaccatgaagttactctcaaagacctttttgatattaactctcaccttcttcttctttggcattgcactagcgaaacagagctttgaaccagagatcgaagctttgaaatccttcaagaatggtatttccaacgaccctttaggagtattatcagattggaccatcatcggttcgttacgacactgtaattggaccggaatcacctgcgatagtaccggacatgtagtctcggtttccttgctggagaagcaacttgaaggtgttctgtctccagccatagcgaatctcacctatctccaggttcttgatctcacttcaaatagttttaccggcaaaataccggctgaaataggaaagttaaccgagcttaaccagcttattctgtacctaaactatttctctggttcgattccttctggaatctgggagcttaagaatattttctatcttgatcttagaaataatttgttgtccggtgatgttcctgaggaaatctgcaaaaccagttctttggtattgattgggtttgattacaacaacttaaccgggaaaataccagaatgcttaggagatttggttcatctccaaatgtttgtagcagctggtaaccatttaactggttcgattccggtatcaattggtactctggctaatttaacggatttagacctgagtggtaaccagttaaccggaaaaataccgagagattttggaaatctcttgaacttacagtctctcgttttaactgaaaacttgttggaaggagatataccagctgagatcggaaactgctcgagcttggtccaacttgagctttacgataaccagttaaccgggaaaataccagctgaattagggaatttggttcagctgcaagcactccggatatacaagaacaaacttacttcttcaattccatcttcattgttccggttaactcagttaacccatttggggttatcagaaaaccatttggttggaccgatatcagaagaaatcggttttcttgagtcacttgaagtcctcacacttcattccaacaacttcacaggagagtttccacagtccatcacaaacttgaggaacttgacagtcctaacggtggggttcaataatatttccggtgagctcccggcggatctagggcttcttacaaaccttcggaacctttcagcgcacgacaatcttcttaccggaccaataccttccagcataagtaactgcaccggtcttaaactcctggacctgtctcacaaccaaatgactggcgagatcccgcggggtttcggaaggatgaatcttacgttcatttctattgggaggaatcatttcaccggtgaaattccagatgatatcttcaactgttcaaacttggaaactcttagtgtggcagataacaacttaacaggaactctcaagccattaattgggaagcttcaaaaactcaggattttgcaagtttcatataactctctcactggaccgattcctcgagaaatcgggaatctgaaagatttgaatatcttgtaccttcactctaatggtttcacagggagaatcccgagagagatgtcgaatctcactctcctccaggggctaaggatgtattcaaatgatcttgaaggtccaattcctgaagaaatgtttgatatgaagctactctcagttcttgatctttccaacaacaaattctcaggtcaaattcctgccttgttctccaagcttgaatcgcttacctacttgagtcttcaaggaaacaaattcaacgggtctatccctgcaagccttaagtcgctttcgcttctcaacacattcgatatctccgacaatcttctcactggaaccatccctggagagctgttagcttctttgaaaaacatgcagctttacctcaacttctcaaacaacttgttgactggaaccatcccaaaggagcttggaaagcttgaaatggttcaagaaatcgacctttcaaacaatctcttttctgggtctattccaagatctttacaggcctgcaaaaatgtgttcacactggatttttcgcagaacaatctctcgggtcatataccagatgaagtcttccaaggcatggatatgatcataagcttgaacctttcaaggaacagtttctctggagaaatccctcagagcttcgggaacatgacgcatttggtctccttggatctctctagtaacaatctcactggtgaaattccagagagtctcgccaatctttcgactctgaaacatctcaaactagcttcaaacaacctcaaaggccatgttcctgaatccggggtgttcaaaaacatcaacgcctctgatctaatgggaaacacagatctctgtggtagcaagaagcctctcaagccatgtacgatcaagcagaagtcgagccacttctcgaagagaaccagagtcatcctgattattcttggatcagccgcggctcttcttcttgtcctgcttcttgttctgattctaacctgttgcaagaaaaaagaaaaaaagattgaaaattcatcagagtcctcattaccggatttggattcagctctgaaactgaagagatttgaaccaaaagagttggagcaagcaacagattcattcaacagtgccaacatcattggctcaagcagcttaagcacagtgtacaaaggtcagctagaagatgggacagtgattgcagtaaaagtattgaatctaaaggaattctctgcagaatcagacaagtggttctacacagaagctaaaacattgagccaactaaaacatcgaaacctggtgaagatcttagggtttgcgtgggaaagcggcaaaacgaaagctttagtgcttccatttatggagaatggaaacttggaggacaccattcacggctctgcagcaccgattgggtcgcttttagaaaaaatcgatctttgtgttcatatcgcaagcggaatcgattatcttcattctggatatggttttcccatcgttcattgtgatctgaagccagctaatatactccttgacagtgaccgcgttgctcacgtaagcgattttggaactgctcggattctaggtttccgcgaagatggaagcaccacagcttcaacatcagccttcgagggtacaattggatacttagctccagagtttgcttatatgaggaaagtgacaacaaaagccgatgtattcagcttcgggatcataatgatggagctgatgacgaaacagagaccaacttcgttgaatgatgaagattcacaagacatgactttgcgccaattggtggagaaatcgattggaaatggaagaaaagggatggttagggttcttgatatggaactcggggactctattgtttctctgaaacaggaagaggctattgaagactttctgaagctttgtttgttctgtacaagctctagacctgaagatcgacctgatatgaacgagattcttacacatctgatgaaacttagaggcaaagcgaattcatttcgagaagatcgtaacgaggatcgagaagtttagcagcaaagcttttttgatgacattttttcgactttgccaaactctgttacgaaggttgaatactttggacgtaaaacgttctgattttgcttttcgttatgtatttctgttttatataaggttgaaatttggttttg

SEQ ID NO: 32721 - protein, 1173 aa, Arabidopsis thaliana
  misc_feature (1)..(1173): Ceres Seq. ID no. 13600824
MKLLSKTFLILTLTFFFFGIALAKQSFEPEIEALKSFKNGISNDPLGVLSDWTIIGSLRHCNWTGITCDSTGHVVSVSLLEKQLEGVLSPAIANLTYLQVLDLTSNSFTGKIPAEIGKLTELNQLILYLNYFSGSIPSGIWELKNIFYLDLRNNLLSGDVPEEICKTSSLVLIGFDYNNLTGKIPECLGDLVHLQMFVAAGNHLTGSIPVSIGTLANLTDLDLSGNQLTGKIPRDFGNLLNLQSLVLTENLLEGDIPAEIGNCSSLVQLELYDNQLTGKIPAELGNLVQLQALRIYKNKLTSSIPSSLFRLTQLTHLGLSENHLVGPISEEIGFLESLEVLTLHSNNFTGEFPQSITNLRNLTVLTVGFNNISGELPADLGLLTNLRNLSAHDNLLTGPIPSSISNCTGLKLLDLSHNQMTGEIPRGFGRMNLTFISIGRNHFTGEIPDDIFNCSNLETLSVADNNLTGTLKPLIGKLQKLRILQVSYNSLTGPIPREIGNLKDLNILYLHSNGFTGRIPREMSNLTLLQGLRMYSNDLEGPIPEEMFDMKLLSVLDLSNNKFSGQIPALFSKLESLTYLSLQGNKFNGSIPASLKSLSLLNTFDISDNLLTGTIPGELLASLKNMQLYLNFSNNLLTGTIPKELGKLEMVQEIDLSNNLFSGSIPRSLQACKNVFTLDFSQNNLSGHIPDEVFQGMDMIISLNLSRNSFSGEIPQSFGNMTHLVSLDLSSNNLTGEIPESLANLSTLKHLKLASNNLKGHVPESGVFKNINASDLMGNTDLCGSKKPLKPCTIKQKSSHFSKRTRVILIILGSAAALLLVLLLVLILTCCKKKEKKIENSSESSLPDLDSALKLKRFEPKELEQATDSFNSANIIGSSSLSTVYKGQLEDGTVIAVKVLNLKEFSAESDKWFYTEAKTLSQLKHRNLVKILGFAWESGKTKALVLPFMENGNLEDTIHGSAAPIGSLLEKIDLCVHIASGIDYLHSGYGFPIVHCDLKPANILLDSDRVAHVSDFGTARILGFREDGSTTASTSAFEGTIGYLAPEFAYMRKVTTKADVFSFGIIMMELMTKQRPTSLNDEDSQDMTLRQLVEKSIGNGRKGMVRVLDMELGDSIVSLKQEEAIEDFLKLCLFCTSSRPEDRPDMNEILTHLMKLRGKANSFREDRNEDREV

SEQ ID NO: 32722 - protein, 978 aa, Arabidopsis thaliana
  misc_feature (1)..(978): Ceres Seq. ID no. 13600825
MFVAAGNHLTGSIPVSIGTLANLTDLDLSGNQLTGKIPRDFGNLLNLQSLVLTENLLEGDIPAEIGNCSSLVQLELYDNQLTGKIPAELGNLVQLQALRIYKNKLTSSIPSSLFRLTQLTHLGLSENHLVGPISEEIGFLESLEVLTLHSNNFTGEFPQSITNLRNLTVLTVGFNNISGELPADLGLLTNLRNLSAHDNLLTGPIPSSISNCTGLKLLDLSHNQMTGEIPRGFGRMNLTFISIGRNHFTGEIPDDIFNCSNLETLSVADNNLTGTLKPLIGKLQKLRILQVSYNSLTGPIPREIGNLKDLNILYLHSNGFTGRIPREMSNLTLLQGLRMYSNDLEGPIPEEMFDMKLLSVLDLSNNKFSGQIPALFSKLESLTYLSLQGNKFNGSIPASLKSLSLLNTFDISDNLLTGTIPGELLASLKNMQLYLNFSNNLLTGTIPKELGKLEMVQEIDLSNNLFSGSIPRSLQACKNVFTLDFSQNNLSGHIPDEVFQGMDMIISLNLSRNSFSGEIPQSFGNMTHLVSLDLSSNNLTGEIPESLANLSTLKHLKLASNNLKGHVPESGVFKNINASDLMGNTDLCGSKKPLKPCTIKQKSSHFSKRTRVILIILGSAAALLLVLLLVLILTCCKKKEKKIENSSESSLPDLDSALKLKRFEPKELEQATDSFNSANIIGSSSLSTVYKGQLEDGTVIAVKVLNLKEFSAESDKWFYTEAKTLSQLKHRNLVKILGFAWESGKTKALVLPFMENGNLEDTIHGSAAPIGSLLEKIDLCVHIASGIDYLHSGYGFPIVHCDLKPANILLDSDRVAHVSDFGTARILGFREDGSTTASTSAFEGTIGYLAPEFAYMRKVTTKADVFSFGIIMMELMTKQRPTSLNDEDSQDMTLRQLVEKSIGNGRKGMVRVLDMELGDSIVSLKQEEAIEDFLKLCLFCTSSRPEDRPDMNEILTHLMKLRGKANSFREDRNEDREV

SEQ ID NO: 32723 - protein, 754 aa, Arabidopsis thaliana
  misc_feature (1)..(754): Ceres Seq. ID no. 13600826
MTGEIPRGFGRMNLTFISIGRNHFTGEIPDDIFNCSNLETLSVADNNLTGTLKPLIGKLQKLRILQVSYNSLTGPIPREIGNLKDLNILYLHSNGFTGRIPREMSNLTLLQGLRMYSNDLEGPIPEEMFDMKLLSVLDLSNNKFSGQIPALFSKLESLTYLSLQGNKFNGSIPASLKSLSLLNTFDISDNLLTGTIPGELLASLKNMQLYLNFSNNLLTGTIPKELGKLEMVQEIDLSNNLFSGSIPRSLQACKNVFTLDFSQNNLSGHIPDEVFQGMDMIISLNLSRNSFSGEIPQSFGNMTHLVSLDLSSNNLTGEIPESLANLSTLKHLKLASNNLKGHVPESGVFKNINASDLMGNTDLCGSKKPLKPCTIKQKSSHFSKRTRVILIILGSAAALLLVLLLVLILTCCKKKEKKIENSSESSLPDLDSALKLKRFEPKELEQATDSFNSANIIGSSSLSTVYKGQLEDGTVIAVKVLNLKEFSAESDKWFYTEAKTLSQLKHRNLVKILGFAWESGKTKALVLPFMENGNLEDTIHGSAAPIGSLLEKIDLCVHIASGIDYLHSGYGFPIVHCDLKPANILLDSDRVAHVSDFGTARILGFREDGSTTASTSAFEGTIGYLAPEFAYMRKVTTKADVFSFGIIMMELMTKQRPTSLNDEDSQDMTLRQLVEKSIGNGRKGMVRVLDMELGDSIVSLKQEEAIEDFLKLCLFCTSSRPEDRPDMNEILTHLMKLRGKANSFREDRNEDREV

SEQ ID NO: 32724 - DNA, 1353 bp, Arabidopsis thaliana
  misc_feature (1)..(1353): Ceres Seq. ID no. 13600835
aatttcatttctccaaagctttccagaatactctccactccttcatcatttctctggcaacgatggctatgatatctcaccgtctccgacgagctttactcactgcgacttcctatgttaaccgatcaattagctcttcgatcacaccagcgtctgatttcccttctgtgtcggcggcggtgttaaagagatccgttatagggcgttcgacggaagtagctactcgagcaccggcgagactgttttcaacgaggcagtacaagctttacaaagaaggtgatgagatcacggaagacactgtgttgttcgaaggatgtgattataatcactggcttatcactatggatttctccaaagaggaaactcctaagtctccagaagaaatggtcgctgcttatgaagaaacttgcgcccaaggacttggcatcagcgtggaagaggctaagcaaaggatgtatgcttgtagcacaactacttaccaaggatttcaagcaatcatgactgaacaagaatcagaaaagttcaaggatctacccggagtggttttcatcttgccagattcctacattgatccccagaacaaagagtatggaggagataaatacgagaatggagtgataacacacaggccaccaccgattcagagtggcagagcaagacctcgtcctagatttgaccgttcaggaggaggaagtggtggtccccaaaacttccaaagaaacacacagtatggtcagcaaccaccaatgcaaggtggtggagggagctatggtcctcaacagggctatgccactccaggacaaggtcagggaactcaagcgcctccaccatttcaaggaggttataaccaaggcccgagatctccaccacctccatatcaggcaggttacaatcaaggccagggatctccagtgcctccatatcaggcaggttacaatcaagtccagggatctccagtgcctccataccaaggaacacaaagcagttacggtcaaggtggatctgggaactatagtcaagggccacaaggtggttacaaccaaggaggacctaggaattacaatccacagggagctggaaactttggtcctgcatctggagctggaaacttaggtcctgcacctggagctggaaatcctggctatggtcaggggtattctggaccaggacaagagcagaatcagacattcccacaggcagatcagaggaatcgagactggaacaacaataatccagcaggccagcccgggtctgaccaagtaagatctcgatcaataatgaatcttgcatctttcttttttgatatcctcatcaggcattaaagtaccccattttccccatatttgttactga

SEQ ID NO: 32725 - protein, 439 aa, Arabidopsis thaliana
  misc_feature (1)..(439): Ceres Seq. ID no. 13600836
FHFSKAFQNTLHSFIISLATMAMISHRLRRALLTATSYVNRSISSSITPASDFPSVSAAVLKRSVIGRSTEVATRAPARLFSTRQYKLYKEGDEITEDTVLFEGCDYNHWLITMDFSKEETPKSPEEMVAAYEETCAQGLGISVEEAKQRMYACSTTTYQGFQAIMTEQESEKFKDLPGVVFILPDSYIDPQNKEYGGDKYENGVITHRPPPIQSGRARPRPRFDRSGGGSGGPQNFQRNTQYGQQPPMQGGGGSYGPQQGYATPGQGQGTQAPPPFQGGYNQGPRSPPPPYQAGYNQGQGSPVPPYQAGYNQVQGSPVPPYQGTQSSYGQGGSGNYSQGPQGGYNQGGPRNYNPQGAGNFGPASGAGNLGPAPGAGNPGYGQGYSGPGQEQNQTFPQADQRNRDWNNNNPAGQPGSDQVRSRSIMNLASFFFDILIRH

SEQ ID NO: 32726 - protein, 419 aa, Arabidopsis thaliana
  misc_feature (1)..(419): Ceres Seq. ID no. 13600837
MAMISHRLRRALLTATSYVNRSISSSITPASDFPSVSAAVLKRSVIGRSTEVATRAPARLFSTRQYKLYKEGDEITEDTVLFEGCDYNHWLITMDFSKEETPKSPEEMVAAYEETCAQGLGISVEEAKQRMYACSTTTYQGFQAIMTEQESEKFKDLPGVVFILPDSYIDPQNKEYGGDKYENGVITHRPPPIQSGRARPRPRFDRSGGGSGGPQNFQRNTQYGQQPPMQGGGGSYGPQQGYATPGQGQGTQAPPPFQGGYNQGPRSPPPPYQAGYNQGQGSPVPPYQAGYNQVQGSPVPPYQGTQSSYGQGGSGNYSQGPQGGYNQGGPRNYNPQGAGNFGPASGAGNLGPAPGAGNPGYGQGYSGPGQEQNQTFPQADQRNRDWNNNNPAGQPGSDQVRSRSIMNLASFFFDILIRH

SEQ ID NO: 32727 - protein, 417 aa, Arabidopsis thaliana
  misc_feature (1)..(417): Ceres Seq. ID no. 13600838
MISHRLRRALLTATSYVNRSISSSITPASDFPSVSAAVLKRSVIGRSTEVATRAPARLFSTRQYKLYKEGDEITEDTVLFEGCDYNHWLITMDFSKEETPKSPEEMVAAYEETCAQGLGISVEEAKQRMYACSTTTYQGFQAIMTEQESEKFKDLPGVVFILPDSYIDPQNKEYGGDKYENGVITHRPPPIQSGRARPRPRFDRSGGGSGGPQNFQRNTQYGQQPPMQGGGGSYGPQQGYATPGQGQGTQAPPPFQGGYNQGPRSPPPPYQAGYNQGQGSPVPPYQAGYNQVQGSPVPPYQGTQSSYGQGGSGNYSQGPQGGYNQGGPRNYNPQGAGNFGPASGAGNLGPAPGAGNPGYGQGYSGPGQEQNQTFPQADQRNRDWNNNNPAGQPGSDQVRSRSIMNLASFFFDILIRH

SEQ ID NO: 32728 - DNA, 2367 bp, Arabidopsis thaliana
  misc_feature (1)..(2367): Ceres Seq. ID no. 13600852
gagcagccaaaacatttcttgttcatctctccgaccttaaaccctccgatccaaaaatctccaccgactctaatccaatcaaatggcctccgtcgcgcttctacggtcttttcgtcgccgtgaagtccaaatggcttccgtatctgcgtttaaatccgtttccgcaaatggaaagaattctatgtttgggaaattaggttacttggcgagacctttctgctcgaggcctgtggggaatgatgttattggtattgatttgggtactaccaattcttgtgtatctgtgatggagggaaagaccgctagggttattgagaatgcggaaggaagtcgaaccacaccatcggttgttgctatgaaccaaaaaggggaactccttgttggaacaccggctaaacgtcaggccgtgaccaatccaacaaacacgattttcggttctaaacgtttgattgggagacgttttgatgatccacagactcagaaggagatgaaaatggttccttacaagattgttaaggcacctaacggtgatgcttgggtcgaagccaatggacaaaagttttctcccagtcagattggagctaatgtcctcactaaaatgaaggaaacagctgaagcttacctcgggaaatctatcaacaaagctgttgttaccgttccagcttatttcaatgatgcacagagacaagccactaaggatgctgggaaaatcgctggtcttgatgtccagaggatcatcaacgaacctacagctgctgcactatcatatggtatgaacaacaaggaaggtgtcattgcagtgtttgatcttggaggtggaacctttgatgtttctatcttggaaatctcaagtggtgtttttgaggttaaagcaacaaatggagatacctttttgggaggagaagactttgacaacaccttgttggagtacttggttaatgagttcaaaagatcagataatattgatctgactaaagacaaccttgccctccagaggctgagagaagctgcagagaaggccaagattgagctctcatcgacaactcagaccgaaatcaacctgcctttcattacagcggatgcttcaggagctaagcacttgaacatcaccttaactaggtcaaagtttgaaggtttggtgggcaagttgattgagagaacaagatccccgtgccaaaactgcctgaaggatgctggagtcacaattaaggaagttgatgaggttcttcttgttggtggaatgacccgtgttcccaaagtgcaagagatagtttctgagatctttgggaagagtccttgtaaaggtgttaacccggatgaagcggttgccatgggagcagccattcaaggtggtatcctccgtggtgatgtgaaggatttgcttcttttggacgtggttcctctctcattgggtattgaaacattgggtgcagtcttcaccaagttgattccacgaaacaccactattcccacaaagaagtctcaggttttctccacagctgctgacaaccagatgcaagtgggaatcaaagttcttcagggagaacgtgaaatggcggctgacaacaaagtgcttggagaattcgaccttgttggcatcccaccggcacctagaggaatgccacagatcgaagttacattcgacattgatgcaaatggtattactactgtctcagcgaaagacaaagcaacaggtaaagagcagaatatcacaatcagatcttcaggtggtctctcagacgatgagattaacagaatggtgaaagaagctgagcttaacgcacagaaggatcaagagaagaagcaacttatcgaccttaggaacagtgctgatacaacaatttacagtgtagagaagagcttgagtgaatacagagagaagattccagctgagattgcctctgagatcgaaactgcagtgtctgatctcaggactgctatggctggtgaggatgtcgaggacatcaaggctaaggtcgaagctgcaaacaaggcagtgtcgaagatcggagaacacatgtctaagggatctggatcatctggttccgatggaagctctggtgagggtacaagtgggactgagcagacgcctgaagctgaattcgaggaggccagtggttcaaggaagtgaggttgccgctaaccggttccatacagaaatcaggtttttcccaaaataagtttacatgcttatctcctccctcacaaatttgattagttttgtgtatttaaaaccttatttgagaggtatcatctcttcgaaacctattgagagtcccggatgtagtttgtttgattggttattttcatgaagtttacggttattatcttgaccggttaaatgagtcaatttcacataagattatg

SEQ ID NO: 32729 - protein, 682 aa, Arabidopsis thaliana
  misc_feature (1)..(682): Ceres Seq. ID no. 13600853
MASVALLRSFRRREVQMASVSAFKSVSANGKNSMFGKLGYLARPFCSRPVGNDVIGIDLGTTNSCVSVMEGKTARVIENAEGSRTTPSVVAMNQKGELLVGTPAKRQAVTNPTNTIFGSKRLIGRRFDDPQTQKEMKMVPYKIVKAPNGDAWVEANGQKFSPSQIGANVLTKMKETAEAYLGKSINKAVVTVPAYFNDAQRQATKDAGKIAGLDVQRIINEPTAAALSYGMNNKEGVIAVFDLGGGTFDVSILEISSGVFEVKATNGDTFLGGEDFDNTLLEYLVNEFKRSDNIDLTKDNLALQRLREAAEKAKIELSSTTQTEINLPFITADASGAKHLNITLTRSKFEGLVGKLIERTRSPCQNCLKDAGVTIKEVDEVLLVGGMTRVPKVQEIVSEIFGKSPCKGVNPDEAVAMGAAIQGGILRGDVKDLLLLDVVPLSLGIETLGAVFTKLIPRNTTIPTKKSQVFSTAADNQMQVGIKVLQGEREMAADNKVLGEFDLVGIPPAPRGMPQIEVTFDIDANGITTVSAKDKATGKEQNITIRSSGGLSDDEINRMVKEAELNAQKDQEKKQLIDLRNSADTTIYSVEKSLSEYREKIPAEIASEIETAVSDLRTAMAGEDVEDIKAKVEAANKAVSKIGEHMSKGSGSSGSDGSSGEGTSGTEQTPEAEFEEASGSRK

SEQ ID NO: 32730 - protein, 666 aa, Arabidopsis thaliana
  misc_feature (1)..(666): Ceres Seq. ID no. 13600854
MASVSAFKSVSANGKNSMFGKLGYLARPFCSRPVGNDVIGIDLGTTNSCVSVMEGKTARVIENAEGSRTTPSVVAMNQKGELLVGTPAKRQAVTNPTNTIFGSKRLIGRRFDDPQTQKEMKMVPYKIVKAPNGDAWVEANGQKFSPSQIGANVLTKMKETAEAYLGKSINKAVVTVPAYFNDAQRQATKDAGKIAGLDVQRIINEPTAAALSYGMNNKEGVIAVFDLGGGTFDVSILEISSGVFEVKATNGDTFLGGEDFDNTLLEYLVNEFKRSDNIDLTKDNLALQRLREAAEKAKIELSSTTQTEINLPFITADASGAKHLNITLTRSKFEGLVGKLIERTRSPCQNCLKDAGVTIKEVDEVLLVGGMTRVPKVQEIVSEIFGKSPCKGVNPDEAVAMGAAIQGGILRGDVKDLLLLDVVPLSLGIETLGAVFTKLIPRNTTIPTKKSQVFSTAADNQMQVGIKVLQGEREMAADNKVLGEFDLVGIPPAPRGMPQIEVTFDIDANGITTVSAKDKATGKEQNITIRSSGGLSDDEINRMVKEAELNAQKDQEKKQLIDLRNSADTTIYSVEKSLSEYREKIPAEIASEIETAVSDLRTAMAGEDVEDIKAKVEAANKAVSKIGEHMSKGSGSSGSDGSSGEGTSGTEQTPEAEFEEASGSRK

SEQ ID NO: 32731 - protein, 649 aa, Arabidopsis thaliana
  misc_feature (1)..(649): Ceres Seq. ID no. 13600855
MFGKLGYLARPFCSRPVGNDVIGIDLGTTNSCVSVMEGKTARVIENAEGSRTTPSVVAMNQKGELLVGTPAKRQAVTNPTNTIFGSKRLIGRRFDDPQTQKEMKMVPYKIVKAPNGDAWVEANGQKFSPSQIGANVLTKMKETAEAYLGKSINKAVVTVPAYFNDAQRQATKDAGKIAGLDVQRIINEPTAAALSYGMNNKEGVIAVFDLGGGTFDVSILEISSGVFEVKATNGDTFLGGEDFDNTLLEYLVNEFKRSDNIDLTKDNLALQRLREAAEKAKIELSSTTQTEINLPFITADASGAKHLNITLTRSKFEGLVGKLIERTRSPCQNCLKDAGVTIKEVDEVLLVGGMTRVPKVQEIVSEIFGKSPCKGVNPDEAVAMGAAIQGGILRGDVKDLLLLDVVPLSLGIETLGAVFTKLIPRNTTIPTKKSQVFSTAADNQMQVGIKVLQGEREMAADNKVLGEFDLVGIPPAPRGMPQIEVTFDIDANGITTVSAKDKATGKEQNITIRSSGGLSDDEINRMVKEAELNAQKDQEKKQLIDLRNSADTTIYSVEKSLSEYREKIPAEIASEIETAVSDLRTAMAGEDVEDIKAKVEAANKAVSKIGEHMSKGSGSSGSDGSSGEGTSGTEQTPEAEFEEASGSRK

SEQ ID NO: 32732 - DNA, 973 bp, Arabidopsis thaliana
  misc_feature (1)..(973): Ceres Seq. ID no. 13600903
gaaaaatattcacagatattttcgatcttaaccgagaaaaaggaagaaatggctggaccatcgacaacttcaaacgcaccaaagcagaggaagagagtcgaagccgagactagcagcaacacttctactaccttacgtcgcgctaaagacggaagcgctttcgctctctgtgaaggatgtaacaagagtgtagctgtagcgcttataagcatgcacaattgcagtctcgatgctaagatcagagtgaatctcgaagcacaagttgtggagacacaagcagaggctaagaagaagcctgcagagaagaagaagacaacatctgatggacctaagccaaagagacttaagaaaaccaatgatgagaagaagagctcgtctacttcaaacaagcccaagcgacctcttaccgctttctttatcttcatgagtgacttccgtaaaacgtttaagtcagagcataatggttcgttagctaaggatgctgcaaagatcggtggtgagaagtggaagtctttgactgaggaagagaagaaagtttatctggataaagctgctgaacttaaggcagagtataacaagtcactggaaagtaatgatgctgatgaggaagaggaagatgaggagaagcaatctgatgatgttgatgatgctgaggagaaacaagttgacgatgatgatgaagttgaggagaaagaagttgagaacacagatgatgacaagaaagaagctgagggtaaagaagaggaggaagaagagattttggatgactactagaaatgatatgctcgtttttgtggttctagtcttactgaaatcggtttatctctaatcgttgcgatgcattgtaaatgaagcctttattagtgaaagtagtttatttgaagttaagttgtgagcaagtgggttttttgtagttcactgaaatggtaatgccttttgtttaaacaagtaatgaagctatgtttttcgtttt

SEQ ID NO: 32733 - protein, 257 aa, Arabidopsis thaliana
  misc_feature (1)..(257): Ceres Seq. ID no. 13600904
EKYSQIFSILTEKKEEMAGPSTTSNAPKQRKRVEAETSSNTSTTLRRAKDGSAFALCEGCNKSVAVALISMHNCSLDAKIRVNLEAQVVETQAEAKKKPAEKKKTTSDGPKPKRLKKTNDEKKSSSTSNKPKRPLTAFFIFMSDFRKTFKSEHNGSLAKDAAKIGGEKWKSLTEEEKKVYLDKAAELKAEYNKSLESNDADEEEEDEEKQSDDVDDAEEKQVDDDDEVEEKEVENTDDDKKEAEGKEEEEEEILDDY

SEQ ID NO: 32734 - protein, 241 aa, Arabidopsis thaliana
  misc_feature (1)..(241): Ceres Seq. ID no. 13600905
MAGPSTTSNAPKQRKRVEAETSSNTSTTLRRAKDGSAFALCEGCNKSVAVALISMHNCSLDAKIRVNLEAQVVETQAEAKKKPAEKKKTTSDGPKPKRLKKTNDEKKSSSTSNKPKRPLTAFFIFMSDFRKTFKSEHNGSLAKDAAKIGGEKWKSLTEEEKKVYLDKAAELKAEYNKSLESNDADEEEEDEEKQSDDVDDAEEKQVDDDDEVEEKEVENTDDDKKEAEGKEEEEEEILDDY

SEQ ID NO: 32735 - protein, 187 aa, Arabidopsis thaliana
  misc_feature (1)..(187): Ceres Seq. ID no. 13600906
MHNCSLDAKIRVNLEAQVVETQAEAKKKPAEKKKTTSDGPKPKRLKKTNDEKKSSSTSNKPKRPLTAFFIFMSDFRKTFKSEHNGSLAKDAAKIGGEKWKSLTEEEKKVYLDKAAELKAEYNKSLESNDADEEEEDEEKQSDDVDDAEEKQVDDDDEVEEKEVENTDDDKKEAEGKEEEEEEILDDY

SEQ ID NO: 32736 - DNA, 1212 bp, Arabidopsis thaliana
  misc_feature (1)..(1212): Ceres Seq. ID no. 13600910
actgtactcttccaccaaatccattaatcatcatcttttcttcacagagaggaaaaaaaaaaaatggcgacagattctcaaccaaaccaaaagctaacgcttccgttaaaaacaagaatcgctctcaccgttatctccaccatgaccgataacgctcaacgtcctgacggaactatcaaccgccgtttcctccgcctcttcgatttccgtgctcctcccaatcctaaacccgtcaacatcgtctccacctccgatttcgtcgtggatcaatcccgtgatctctggttccgattgtacactccacatgtctccggcgataaaatccccgtcgttgttttcttccacggcggtggtttcgctttcctcagtcctaatgcgtatccttacgataatgtatgccggagattcgctaggaaattacctgcttatgtcatctccgttaactaccgtctcgctccggagcatcgttatcctgctcaatacgacgacggtttcgatgctttgaagtacatcgaggagaatcacggttcgattcttccggcgaacgctgatctctcgagatgcttcttcgccggagacagtgcaggtggaaacatcgcgcacaacgtcgcgattcgaatttgtcgcgagccgcggtcatctttcaccgccgtgaaactcatcggacttatctcgattcaacctttcttcggcggagaagagagaacggaagcggagaaacaactcgtcggagctcctttggtttcaccggaccgaacagattggtgctggaaagcgatgggattaaaccgggatcatgaagcggttaacgtcggcggaccaaacgcggttgatatatcgggtctggattatccggagacgatggtggtagtagctgggtttgatccgttaaaagattggcagagaagttactacgagtggttaaagttatgcggtaaaaaagcaacgttaatcgaatatccaaacatgtttcatgcgttttacattttccctgaattgcctgaggcgggtcagttaattatgcggattaaggattttgttgatgagcgcgtggcttcgctctccgcttaatcaccttcgctaatgatggatatttaaattagctcaatgaataataatgtattaagctctatgcttgtgtcttgtttagtgttttaaaaatggtgtaggtcgatctattttcattattaatcaagtgttcaactttaagtg

SEQ ID NO: 32737 - protein, 335 aa, Arabidopsis thaliana
  misc_feature (1)..(335): Ceres Seq. ID no. 13600911
MATDSQPNQKLTLPLKTRIALTVISTMTDNAQRPDGTINRRFLRLFDFRAPPNPKPVNIVSTSDFVVDQSRDLWFRLYTPHVSGDKIPVVVFFHGGGFAFLSPNAYPYDNVCRRFARKLPAYVISVNYRLAPEHRYPAQYDDGFDALKYIEENHGSILPANADLSRCFFAGDSAGGNIAHNVAIRICREPRSSFTAVKLIGLISIQPFFGGEERTEAEKQLVGAPLVSPDRTDWCWKAMGLNRDHEAVNVGGPNAVDISGLDYPETMVVVAGFDPLKDWQRSYYEWLKLCGKKATLIEYPNMFHAFYIFPELPEAGQLIMRIKDFVDERVASLSA

SEQ ID NO: 32738 - protein, 309 aa, Arabidopsis thaliana
  misc_feature (1)..(309): Ceres Seq. ID no. 13600912
MTDNAQRPDGTINRRFLRLFDFRAPPNPKPVNIVSTSDFVVDQSRDLWFRLYTPHVSGDKIPVVVFFHGGGFAFLSPNAYPYDNVCRRFARKLPAYVISVNYRLAPEHRYPAQYDDGFDALKYIEENHGSILPANADLSRCFFAGDSAGGNIAHNVAIRICREPRSSFTAVKLIGLISIQPFFGGEERTEAEKQLVGAPLVSPDRTDWCWKAMGLNRDHEAVNVGGPNAVDISGLDYPETMVVVAGFDPLKDWQRSYYEWLKLCGKKATLIEYPNMFHAFYIFPELPEAGQLIMRIKDFVDERVASLSA

SEQ ID NO: 32739 - DNA, 738 bp, Arabidopsis thaliana
  misc_feature (1)..(738): Ceres Seq. ID no. 13600931
atcttgtgatcatcccaagacaaaaccagagaaaaagacctgtctgtttttttaagaagtctttatattattttttttgtcggagaatcttataagcatggcttcaggaggatcaaagtcggcagctttcatgcttctgatgctgaatcttggtctctatttcgtcatcaccatcatcgcttcttgggctgttaatcacggcatcgagagaactcgcgagtctgcgtcgacactgtcacttccggcgaagatattcccgatatacttcccggtggggaacatggcgaccggttttttcgtaatattcacgttaatcgccggcgtcgtcggaatggccacatcactcaccggaatcatcaacgttcttcaatgggactctccgaatctccactccgccgcggcttcctctctaatctcctggtctctcactctcctcgccatgggattggcctgcaaggagatcaacataggctggaccgaagccaatctaagaactcttgaagttctgactataattgtgagtgctactcagttgttgtgcaccggagctattcatgctggagtcggagaaacagtcgcctccggagaaaggcctcatcttgggagagtttgagtttcatgattcttcttaaaagcggttttacatttgcttcagatcgtgtaatttgtgtgttgtgtcttgtgtgtgtttattcttttgttttgtttgattattatgatcatgtaaaatgattagtt

SEQ ID NO: 32740 - protein, 171 aa, Arabidopsis thaliana
  misc_feature (1)..(171): Ceres Seq. ID no. 13600932
MASGGSKSAAFMLLMLNLGLYFVITIIASWAVNHGIERTRESASTLSLPAKIFPIYFPVGNMATGFFVIFTLIAGVVGMATSLTGIINVLQWDSPNLHSAAASSLISWSLTLLAMGLACKEINIGWTEANLRTLEVLTIIVSATQLLCTGAIHAGVGETVASGERPHLGRV

SEQ ID NO: 32741 - protein, 160 aa, Arabidopsis thaliana
  misc_feature (1)..(160): Ceres Seq. ID no. 13600933
MLLMLNLGLYFVITIIASWAVNHGIERTRESASTLSLPAKIFPIYFPVGNMATGFFVIFTLIAGVVGMATSLTGIINVLQWDSPNLHSAAASSLISWSLTLLAMGLACKEINIGWTEANLRTLEVLTIIVSATQLLCTGAIHAGVGETVASGERPHLGRV

SEQ ID NO: 32742 - protein, 157 aa, Arabidopsis thaliana
  misc_feature (1)..(157): Ceres Seq. ID no. 13600934
MLNLGLYFVITIIASWAVNHGIERTRESASTLSLPAKIFPIYFPVGNMATGFFVIFTLIAGVVGMATSLTGIINVLQWDSPNLHSAAASSLISWSLTLLAMGLACKEINIGWTEANLRTLEVLTIIVSATQLLCTGAIHAGVGETVASGERPHLGRV

SEQ ID NO: 32743 - DNA, 1297 bp, Arabidopsis thaliana
  misc_feature (1)..(1297): Ceres Seq. ID no. 13600935
cgaaaacgaaatctgaaacggtcacacacagtcgctagatatgtctctctcgcttccatcttcttccgccgccgctgctgcggcgtcaacatcgggatcatcatcttctccggcggctgcttcgtcttcctcaacaaccacgtcatggttctccgggatcgttcgtggtcgtggtgataaatccggcaccgcgaagctatctaaaagctcttccatggctggaggaggaagcggaagcggagattacggtggaccaatcaaagggaagaatcaatttcgcggtgttttgttcaaatacggtcctaaatcaattcaggttgcttttaagaccggagagtataaacaacaagtgatatttatcggtggattaactgatggacttttagctactgattacttggaacctcttgcgattgctttggataaagagaaatggtcacttgttcaactactgatgtcttcttcatattctggatttggcacttccagcttgaaacaagatgcacaagaaatcgaccagctaataaaccacctcatcaacaaagagaattctgaaggtgttgttctgcttggtcatagcactggctgtcaggacattgtgtattatatgggaacaaatgcggcatgctcccgagctgtccgggctgcaattttacaggcaccagtcagcgatagagagtacaaagcaacgcttcctgaaacacctgctatgatagacttggctgcaaacatgataaaagaaggtcgaggagaggagctaatgcctagagaagctgatccttgtgctccaatctctgcttatagatatcactccctctgcgcttacatgggagatgacgatatgtttagttctgaccttagtgatgatcagttgaaaactagacttggccatatggctaacacaccttgtcaggtgattttctccatgggtgatgagtatgtaccagattatgtcgacaaaaaagcattggtcaatagattaagtaaagcaatgggaggagcagagaaagtggagatagagcatgggaatcattctctctccaatagagttcatgaagctgttcaagccatcattggttttgtcaaaagagaaggacccagtggttgggatgatccttggagctaaatctgctttttccatttatgtggatgaaaaacttatccaaatctgaatctcatgaattaattcacttcttggctgattcgtaaccatttatccttaaaaagtaaaaaagtaaattgttgtccttttgttctgatatatacttggatcattaagaaaagtgtcttccttatt

SEQ ID NO: 32744 - protein, 361 aa, Arabidopsis thaliana
  misc_feature (1)..(361): Ceres Seq. ID no. 13600936
MSLSLPSSSAAAAAASTSGSSSSPAAASSSSTTTSWFSGIVRGRGDKSGTAKLSKSSSMAGGGSGSGDYGGPIKGKNQFRGVLFKYGPKSIQVAFKTGEYKQQVIFIGGLTDGLLATDYLEPLAIALDKEKWSLVQLLMSSSYSGFGTSSLKQDAQEIDQLINHLINKENSEGVVLLGHSTGCQDIVYYMGTNAACSRAVRAAILQAPVSDREYKATLPETPAMIDLAANMIKEGRGEELMPREADPCAPISAYRYHSLCAYMGDDDMFSSDLSDDQLKTRLGHMANTPCQVIFSMGDEYVPDYVDKKALVNRLSKAMGGAEKVEIEHGNHSLSNRVHEAVQAIIGFVKREGPSGWDDPWS

SEQ ID NO: 32745 - protein, 303 aa, Arabidopsis thaliana
  misc_feature (1)..(303): Ceres Seq. ID no. 13600937
MAGGGSGSGDYGGPIKGKNQFRGVLFKYGPKSIQVAFKTGEYKQQVIFIGGLTDGLLATDYLEPLAIALDKEKWSLVQLLMSSSYSGFGTSSLKQDAQEIDQLINHLINKENSEGVVLLGHSTGCQDIVYYMGTNAACSRAVRAAILQAPVSDREYKATLPETPAMIDLAANMIKEGRGEELMPREADPCAPISAYRYHSLCAYMGDDDMFSSDLSDDQLKTRLGHMANTPCQVIFSMGDEYVPDYVDKKALVNRLSKAMGGAEKVEIEHGNHSLSNRVHEAVQAIIGFVKREGPSGWDDPWS

SEQ ID NO: 32746 - protein, 223 aa, Arabidopsis thaliana
  misc_feature (1)..(223): Ceres Seq. ID no. 13600938
MSSSYSGFGTSSLKQDAQEIDQLINHLINKENSEGVVLLGHSTGCQDIVYYMGTNAACSRAVRAAILQAPVSDREYKATLPETPAMIDLAANMIKEGRGEELMPREADPCAPISAYRYHSLCAYMGDDDMFSSDLSDDQLKTRLGHMANTPCQVIFSMGDEYVPDYVDKKALVNRLSKAMGGAEKVEIEHGNHSLSNRVHEAVQAIIGFVKREGPSGWDDPWS

SEQ ID NO: 32747 - DNA, 1157 bp, Arabidopsis thaliana
  misc_feature (1)..(1157): Ceres Seq. ID no. 13600939
atccttaaagatctcgttgcggtttttgtcggaattgtttcgatttgttgtggttctcaataagctctcgcttgtcagagaaacaccggcaacgccgttgaaatagtcaccggagaccattttgcatcgtagagttcgccttttatggcgttcacgtggggatctgctctccggatttctgttctccttatccttgtagctgcaattgtcttagcttgttattttctccctgttgagaagctattgaaggattttttgttatgggttgaacaagatctagggccttggggaccttttgccctagctgttgcgtacattcctctaacagttttggctgttcctgcctcggttctcacgctcggtggtggctacctttttgggctgccaattggttttgtggcggactcagtcggtgctacacttggctcaggagctgcatttctactaggccgtacgattggaaaaccttttgtagttgcaaaattaaaggattatcctcagtttcaatcagtggcactcgcgatagagaaatccggcttcaagatatgcttgttgctccggcttgctcctcttcttccgttcagcatgttgaactacctcttatctgtcacgccaattcggctaggtccatacttgctttcttcgtggttagggatgatgccaataacacttgcgttagtgtatgttggaacaactctaaaagacctttctgatgtaactcacaagtggagcgagttctcgccaggtcgctgggcgttcttgatttcgagccttgtaatatccgtgatattaatggtgtgtgttacaaaggtggcgaaggacgctctaagaaaagctttagcagagcacggaggagacatgaacgaagcggttgcagccttgccggagctgaccgttactgatgatgcttcgacggatttaaatgagcctctcttgataaagatagatgcacaacaacctcaagaccaagtaaaccatagtcattaaaattaagatgatgaatacttactttgtataatctttattttaacatacaaagcttagttttcttggtttgtataataataacatagattaaaaattatttttaaaaagttatttttcttagtaactttgagatgtaattattagttcacagagatttaaaatattggatg

SEQ ID NO: 32748 - protein, 280 aa, Arabidopsis thaliana
  misc_feature (1)..(280): Ceres Seq. ID no. 13600940
MAFTWGSALRISVLLILVAAIVLACYFLPVEKLLKDFLLWVEQDLGPWGPFALAVAYIPLTVLAVPASVLTLGGGYLFGLPIGFVADSVGATLGSGAAFLLGRTIGKPFVVAKLKDYPQFQSVALAIEKSGFKICLLLRLAPLLPFSMLNYLLSVTPIRLGPYLLSSWLGMMPITLALVYVGTTLKDLSDVTHKWSEFSPGRWAFLISSLVISVILMVCVTKVAKDALRKALAEHGGDMNEAVAALPELTVTDDASTDLNEPLLIKIDAQQPQDQVNHSH

SEQ ID NO: 32749 - DNA, 1259 bp, Arabidopsis thaliana
  misc_feature (1)..(1259): Ceres Seq. ID no. 13600945
aaacaacacacacacaaatggctcctcgtgtgatcttcttacttctctcgcttgtttttctctacctcgcaaacacatcacactctttgagaaagtttcaatcatttctacaccctatttataaagacacggccaaaaatatatacaccatccctttgtccatcggctcaacttccagcgaaaaattcgtccttgacctcaacggagccgcaccgttattgcaaaactgtccaaccgccgccaaatccaccacctaccacccaatcagatgtggctccacaagatgcaaatacgcaaaccccaacttcccctgtcccaacaatgtcattgccaagaagaggaccgtgtgtctctcctccgacaattcccgcctattccgagacaccgtccccttgttatacacatttaatggagtttacactagggacagtgaaatgagttcttcattgactttgacttgcactgacggtgctcctgccttaaaacaaagaaccatcggtctcgctaacacccacttgtcgattccctcgcagctcatctccatgtaccagcttcctcataagatagctctttgtttgccttccaccgaacgaagtcagtctcataatggtgacctttggatcggtaaaggggaatattattatctgccttacgataaagatgtctctaagatctttgcctccacgcctctgatcggtaatggcaagtccggcgagtacttaatcgatgtgaagtccatccaaatcggtgcaaagaccgttcctataccctatggagccacaaagatcagcactttggctccttacaccgtattccaaacttccctttacaaggctctgctcacagctttcaccgaaaacatcaagatagctaaagctcccgcggtgaagcctttcggtgcgtgcttctactccaatggaggacgtggagttcccgtgatcgacctggtgctgagcggaggggctaagtggaggatctacgggtctaattccttggtgaaggtgaataaaaatgtggtttgtttagggtttgtggacggaggtgtgaagccgaagtaccctatagtgatcggaggatttcagatggaggataatttggtggagttcgatcttgaagcttccaaattttctttctcctcttctcttttgcttcacaacacttcttgctcagtgcaaaggttgtctcctttctaatgcatgtgatcgattattcatgttatcaagacatatcatcaatttcctttttaataaattaatgtc

SEQ ID NO: 32750 - protein, 396 aa, Arabidopsis thaliana
  misc_feature (1)..(396): Ceres Seq. ID no. 13600946
TTHTQMAPRVIFLLLSLVFLYLANTSHSLRKFQSFLHPIYKDTAKNIYTIPLSIGSTSSEKFVLDLNGAAPLLQNCPTAAKSTTYHPIRCGSTRCKYANPNFPCPNNVIAKKRTVCLSSDNSRLFRDTVPLLYTFNGVYTRDSEMSSSLTLTCTDGAPALKQRTIGLANTHLSIPSQLISMYQLPHKIALCLPSTERSQSHNGDLWIGKGEYYYLPYDKDVSKIFASTPLIGNGKSGEYLIDVKSIQIGAKTVPIPYGATKISTLAPYTVFQTSLYKALLTAFTENIKIAKAPAVKPFGACFYSNGGRGVPVIDLVLSGGAKWRIYGSNSLVKVNKNVVCLGFVDGGVKPKYPIVIGGFQMEDNLVEFDLEASKFSFSSSLLLHNTSCSVQRLSPF

SEQ ID NO: 32751 - protein, 391 aa, Arabidopsis thaliana
  misc_feature (1)..(391): Ceres Seq. ID no. 13600947
MAPRVIFLLLSLVFLYLANTSHSLRKFQSFLHPIYKDTAKNIYTIPLSIGSTSSEKFVLDLNGAAPLLQNCPTAAKSTTYHPIRCGSTRCKYANPNFPCPNNVIAKKRTVCLSSDNSRLFRDTVPLLYTFNGVYTRDSEMSSSLTLTCTDGAPALKQRTIGLANTHLSIPSQLISMYQLPHKIALCLPSTERSQSHNGDLWIGKGEYYYLPYDKDVSKIFASTPLIGNGKSGEYLIDVKSIQIGAKTVPIPYGATKISTLAPYTVFQTSLYKALLTAFTENIKIAKAPAVKPFGACFYSNGGRGVPVIDLVLSGGAKWRIYGSNSLVKVNKNVVCLGFVDGGVKPKYPIVIGGFQMEDNLVEFDLEASKFSFSSSLLLHNTSCSVQRLSPF

SEQ ID NO: 32752 - protein, 252 aa, Arabidopsis thaliana
  misc_feature (1)..(252): Ceres Seq. ID no. 13600948
MSSSLTLTCTDGAPALKQRTIGLANTHLSIPSQLISMYQLPHKIALCLPSTERSQSHNGDLWIGKGEYYYLPYDKDVSKIFASTPLIGNGKSGEYLIDVKSIQIGAKTVPIPYGATKISTLAPYTVFQTSLYKALLTAFTENIKIAKAPAVKPFGACFYSNGGRGVPVIDLVLSGGAKWRIYGSNSLVKVNKNVVCLGFVDGGVKPKYPIVIGGFQMEDNLVEFDLEASKFSFSSSLLLHNTSCSVQRLSPF

SEQ ID NO: 32753 - DNA, 1535 bp, Arabidopsis thaliana
  misc_feature (1)..(1535): Ceres Seq. ID no. 13600949
acaaacaatcacattcatcatttcatttaccaaaaaaaattataacctgaatataatagagatgggtagtagcctcacgcgcctactagtcttcctttccattttcgcagccatagctctgaaatcaaactctcaataccttcttccgatcaccaagcacgaacccaccaatctattctacaccactttcaacgtcggatccgccgcaaaatctcctgtaaacctcctcctcgacctcggaacaaacctcacgtggctcgactgccgcaaacttaaatctttatcatctctccgcctagtcacttgccagagctccacatgcaagtctatccccggtaatggatgcgctggcaaatcttgtctttacaagcaaccaaacccactcggacaaaaccccgttgtaaccggccgtgtcgtccaagacagagcttccctctacaccacagacggcggcaagttcctctctcaagtctccgtccgccacttcacattctcatgcgccggtgagaaagccctccaaggccttcctcctccagtcgacggagttctggctctttctcccggatcttcgtcgttcacgaaacaagtgacgtcagcgtttaacgtcatccctaaattctctctctgcttgccttcttccggtaccggtcatttctatatcgccggcattcactactttatcccaccattcaatagtagcgataatccgattccaaggactttaactcccattaaaggcactgactcaggagattatctaatcactgtaaaatctatctacgttggtggaactgctttgaagttgaaccctgatttgctaaccggcggagccaaactcagtacggtggttcactacaccgtacttcaaaccgatatctacaatgctcttgctcagtcttttacactcaaggctaaggctatgggaatagctaaggttccatcggtggcgccgtttaaacattgttttgattcacgcaccgctggaaagaatttgacggcggggcctaacgtgcccgtgatagagattggtctgccggggaggataggggaggtaaagtgggggttctacggtgcgaatacggtggtgaaagtgaaggaaacggtgatgtgtttggcgtttatcgacggtggaaagacaccgaaggatttgatggtgattgggacacatcagcttcaagatcatatgctcgagttcgatttcagcgggacggttctcgcttttagtgagtcactcttgctccataacacaagctgctccacttggccttcccaaaaatagaatcatcagtcactcatgatagtatcacagtttttggtcttgtatgacacgttttcagcgacacatgtgttctaatcgaaattttaagaaattatcacccgtttctcataaatatcgtctatgttattttattcaaatttgatattcgcttgttttgataaaaaatattgtctgaggattttgcacattaataattatctaaagtattctgtatttcttattagaaattgcaatttagatttgaaattcaaaagtt

SEQ ID NO: 32754 - protein, 425 aa, Arabidopsis thaliana
  misc_feature (1)..(425): Ceres Seq. ID no. 13600950
QTITFIISFTKKNYNLNIIEMGSSLTRLLVFLSIFAAIALKSNSQYLLPITKHEPTNLFYTTFNVGSAAKSPVNLLLDLGTNLTWLDCRKLKSLSSLRLVTCQSSTCKSIPGNGCAGKSCLYKQPNPLGQNPVVTGRVVQDRASLYTTDGGKFLSQVSVRHFTFSCAGEKALQGLPPPVDGVLALSPGSSSFTKQVTSAFNVIPKFSLCLPSSGTGHFYIAGIHYFIPPFNSSDNPIPRTLTPIKGTDSGDYLITVKSIYVGGTALKLNPDLLTGGAKLSTVVHYTVLQTDIYNALAQSFTLKAKAMGIAKVPSVAPFKHCFDSRTAGKNLTAGPNVPVIEIGLPGRIGEVKWGFYGANTVVKVKETVMCLAFIDGGKTPKDLMVIGTHQLQDHMLEFDFSGTVLAFSESLLLHNTSCSTWPSQK

SEQ ID NO: 32755 - protein, 405 aa, Arabidopsis thaliana
  misc_feature (1)..(405): Ceres Seq. ID no. 13600951
MGSSLTRLLVFLSIFAAIALKSNSQYLLPITKHEPTNLFYTTFNVGSAAKSPVNLLLDLGTNLTWLDCRKLKSLSSLRLVTCQSSTCKSIPGNGCAGKSCLYKQPNPLGQNPVVTGRVVQDRASLYTTDGGKFLSQVSVRHFTFSCAGEKALQGLPPPVDGVLALSPGSSSFTKQVTSAFNVIPKFSLCLPSSGTGHFYIAGIHYFIPPFNSSDNPIPRTLTPIKGTDSGDYLITVKSIYVGGTALKLNPDLLTGGAKLSTVVHYTVLQTDIYNALAQSFTLKAKAMGIAKVPSVAPFKHCFDSRTAGKNLTAGPNVPVIEIGLPGRIGEVKWGFYGANTVVKVKETVMCLAFIDGGKTPKDLMVIGTHQLQDHMLEFDFSGTVLAFSESLLLHNTSCSTWPSQK

SEQ ID NO: 32756 - DNA, 1330 bp, Arabidopsis thaliana
  misc_feature (1)..(1330): Ceres Seq. ID no. 13600952
attcacaataaaccagcgtcggcccaccgcatcccaaaccataacgcttaatccttaaaaaccgtccagatccatttccttcctctaaaactcatcacacacacttctaatggcttcttcttcttgtttgaatctcttcttcttctcttttctctccgctctaatcatttctaaatctcagatctctgattccgttaacggggtcgttttccctgttgttaaagaccttccaaccggtcaatacctcgcacagattcgactcggtgactcaccggatccagtcaagctcgtagtcgatctggccggctcaattctctggtttgattgttcctcaagacatgtttcctcgtcaaggaacctaatatccggtagctctagcggctgcttaaaggcaaaagttggaaatgaacgagtatcatcatcatcatcatcgcgtaaagaccaaaacgccgattgcgaattacttgttaaaaacgacgcctttgggattacggcgagaggagagcttttcagtgacgtcatgtcggttggctctgttacttctccgggaaccgttgatctacttttcgcttgtactccaccgtggctgttacgtgggctcgctagtggagcccaaggagtaatgggcttaggaagggcccaaatctcactcccttcacaactcgccgcggaaactaacgaacgtcgtcggttaactgtttacctgtcgccgttgaacggtgtcgtatcaacgagttcggtggaggaggtttttggagtggctgcgtctagatcgctggtttacacgcctttgttaaccggttcgagtggcaactacgtaattaacgtgaaatcgattagagtcaacggggaaaagctctccgtggaaggtccgttggcggtggagctgagcacggtggttccttacacgattttagagagctcgatctacaaggtgttcgcggaagcttacgccaaagctgcgggtgaagctacatcggtgcctcctgtcgcaccgtttgggctctgcttcactagtgacgtagattttccggcggtagatctagcgttgcagagtgagatggtgcggtggaggattcatgggaagaatctgatggtggatgttggtggtggagtccgatgctcggggattgttgacggcgggtcaagtcgagtcaacccgattgtaatgggtgggctacaattagaaggctttatattggactttgatttgggtaactcaatgatgggctttggacaaagaacacgctctgattcaacttcgttgtaatacagaaacctttgtaattgtaaccttctaattatctggtagatatcctcaattttgatc

SEQ ID NO: 32757 - protein, 386 aa, Arabidopsis thaliana
  misc_feature (1)..(386): Ceres Seq. ID no. 13600953
MASSSCLNLFFFSFLSALIISKSQISDSVNGVVFPVVKDLPTGQYLAQIRLGDSPDPVKLVVDLAGSILWFDCSSRHVSSSRNLISGSSSGCLKAKVGNERVSSSSSSRKDQNADCELLVKNDAFGITARGELFSDVMSVGSVTSPGTVDLLFACTPPWLLRGLASGAQGVMGLGRAQISLPSQLAAETNERRRLTVYLSPLNGVVSTSSVEEVFGVAASRSLVYTPLLTGSSGNYVINVKSIRVNGEKLSVEGPLAVELSTVVPYTILESSIYKVFAEAYAKAAGEATSVPPVAPFGLCFTSDVDFPAVDLALQSEMVRWRIHGKNLMVDVGGGVRCSGIVDGGSSRVNPIVMGGLQLEGFILDFDLGNSMMGFGQRTRSDSTSL

SEQ ID NO: 32758 - protein, 249 aa, Arabidopsis thaliana
  misc_feature (1)..(249): Ceres Seq. ID no. 13600954
MSVGSVTSPGTVDLLFACTPPWLLRGLASGAQGVMGLGRAQISLPSQLAAETNERRRLTVYLSPLNGVVSTSSVEEVFGVAASRSLVYTPLLTGSSGNYVINVKSIRVNGEKLSVEGPLAVELSTVVPYTILESSIYKVFAEAYAKAAGEATSVPPVAPFGLCFTSDVDFPAVDLALQSEMVRWRIHGKNLMVDVGGGVRCSGIVDGGSSRVNPIVMGGLQLEGFILDFDLGNSMMGFGQRTRSDSTSL

SEQ ID NO: 32759 - protein, 215 aa, Arabidopsis thaliana
  misc_feature (1)..(215): Ceres Seq. ID no. 13600955
MGLGRAQISLPSQLAAETNERRRLTVYLSPLNGVVSTSSVEEVFGVAASRSLVYTPLLTGSSGNYVINVKSIRVNGEKLSVEGPLAVELSTVVPYTILESSIYKVFAEAYAKAAGEATSVPPVAPFGLCFTSDVDFPAVDLALQSEMVRWRIHGKNLMVDVGGGVRCSGIVDGGSSRVNPIVMGGLQLEGFILDFDLGNSMMGFGQRTRSDSTSL

SEQ ID NO: 32760 - DNA, 1180 bp, Arabidopsis thaliana
  misc_feature (1)..(1180): Ceres Seq. ID no. 13600988
agattaagtcttcttcgtcatcttcgagtgtgagtggatccagagagagaattagatatttccgacacgaggcaaattcctagtggctcatggcgtcatcatctgatcacacggcgaagataatcgacggcaaggcgattgctcataccatcagatcagagatcgccgaggaagttcgcggtctatctgagaaacacggcaaggtcccaggactagctgtagttattgttgggagccgaaaggattcacagacctatgtgaatacgaagaggaaagcgtgcgctgaggttgggattaagtcatttgacgtgggcctaccagaggaagtttctgaagctgatcttattagcaaagttcatgaactaaattcaaatccggatgtccatggcatattagttcaactcccattgccgaaacatattaatgaggagcatatattgggtgcaatcagcattgataaagatgtcgatggcttccatcctttgaatattggtaagctagccatgaaaggcagagaacccctcttccttccttgcaccccaaagggatgtttggaactcctagctagaagcggcgtaaagataaaggggcaacgagcagttgttgtaggtcggagtaacattgttggtttgcccgtttcacttcttttgctcaaggctgatgctactgtcacaactgtacattctcacaccaaggatcctgaggctatcatacgggaagctgacattgttattgctgcatgcggacaagcccacatgattaagggcaactggataaagccaggggctgcagtaattgatgttggaactaatgcagtcagcgacccgagcaagaaatcaggataccggttggttggagatgttgatttcgcagaagcttcaaaagttgcaggtttcataactccggtccctggtggtgtaggcccaatgacagtggcaatgcttctcaggaacaccgtagacggtgccaagcgtgtctttggcgagtaaaacaatctactgtatgtaataaagaaaccaagagtttctccattctgtaattgtgtacttggcttgacgatatttttccactcaaataaattgaaattggcgttccctttggattaccttacattgttctgcaactagctagaacgattatttccgcaattcagttaaatacaagggtgtcatcatgtgac

SEQ ID NO: 32761 - protein, 299 aa, Arabidopsis thaliana
  misc_feature (1)..(299): Ceres Seq. ID no. 13600989
MASSSDHTAKIIDGKAIAHTIRSEIAEEVRGLSEKHGKVPGLAVVIVGSRKDSQTYVNTKRKACAEVGIKSFDVGLPEEVSEADLISKVHELNSNPDVHGILVQLPLPKHINEEHILGAISIDKDVDGFHPLNIGKLAMKGREPLFLPCTPKGCLELLARSGVKIKGQRAVVVGRSNIVGLPVSLLLLKADATVTTVHSHTKDPEAIIREADIVIAACGQAHMIKGNWIKPGAAVIDVGTNAVSDPSKKSGYRLVGDVDFAEASKVAGFITPVPGGVGPMTVAMLLRNTVDGAKRVFGE

SEQ ID NO: 32762 - protein, 161 aa, Arabidopsis thaliana
  misc_feature (1)..(161): Ceres Seq. ID no. 13600990
MKGREPLFLPCTPKGCLELLARSGVKIKGQRAVVVGRSNIVGLPVSLLLLKADATVTTVHSHTKDPEAIIREADIVIAACGQAHMIKGNWIKPGAAVIDVGTNAVSDPSKKSGYRLVGDVDFAEASKVAGFITPVPGGVGPMTVAMLLRNTVDGAKRVFGE

SEQ ID NO: 32763 - DNA, 771 bp, Arabidopsis thaliana
  misc_feature (1)..(771): Ceres Seq. ID no. 13600991
actcgctcaaaaatttagagaaaggaagaagaagacagatcaatggctccgacgatcaaaagaatcagaagtttccgtactcaccaaaaacactttgtcgattttttcggagacgacttgatcgtcaccgttacgccgactgcttccgttatccgccgctggattcgtagcgtccgctcctacaaccgtaatcactcggtacatcctctcgtcgttggaatcggtgttcagtggagaccggatagttccgatccagatccaccaccaaaaactctccagttgtgcgtcggtagtcgctgtctcatcatccaactaggttacaattacggtctcccaaaagtcctccgcactttccttgccgatcccaaaacgactttcgtcggcgtttggaacggccaagaccagaaaaaactcgagaaatgtaggcatcgagtggagatcgggaagcttctggacataaggatgttcgtgagagattcgagaggggctaggatgtgtttttgttcgtttgaacagatcgtgaaggagcgtttgggtcgcgtaggagtgaggttagatccggcgatttgtatgagcgattggggcgtttataaccttaaccattatcaggtacttcaggcgtcgattgagtcgtatgtttgctttaagctcgctgttgaggaacgtctctggaacttaaaagttgctgctaatcttgtgatttgaatttgttgttgttcttctctctttatcaatcaacgtcttcttctaattcatgaaagttttcatgtt

SEQ ID NO: 32764 - protein, 220 aa, Arabidopsis thaliana
  misc_feature (1)..(220): Ceres Seq. ID no. 13600992
MAPTIKRIRSFRTHQKHFVDFFGDDLIVTVTPTASVIRRWIRSVRSYNRNHSVHPLVVGIGVQWRPDSSDPDPPPKTLQLCVGSRCLIIQLGYNYGLPKVLRTFLADPKTTFVGVWNGQDQKKLEKCRHRVEIGKLLDIRMFVRDSRGARMCFCSFEQIVKERLGRVGVRLDPAICMSDWGVYNLNHYQVLQASIESYVCFKLAVEERLWNLKVAANLVI

SEQ ID NO: 32765 - DNA, 1341 bp, Arabidopsis thaliana
  misc_feature (1)..(1341): Ceres Seq. ID no. 13600997
acgagtatataactacctttcaattctctctgcctctcatagttaatatatatacgttcacaatcacttctcttctctatttcttattcattatctcaaccctctctctctctctctcagtacaacttatcatccatcaccatatatagagaatatgagcaaaacggaagcaatcagcttgaccaaaaggggaatgttgccgccaagtagttgcaatagcctaatggaccgctctgagtcccttaagagggacagtgtgatgggcaatggtgcagccaaagtgagaggaagcttggagcgcaagaaatcaaagagttttaaggaaggagatagttattcttcgtggctcataacggaggctcctgggagtatagccgccgtgaggagagagcaagtggcggcacaacaagcactaaggaaactaaagattgctcattacggtagatccaaatcaaccattaatttcacttcttccaaagtcgtccctcttcttaaccctaaccctaaccctcatcctcagagatgcagcttcctcacccccacttctgatcctatttacgtggcctaccatgatgaagaatggggagttccagttcatgatgacaagacgttgttcgaactgctgaccctaagcggcgcacaagtaggctccgattggacttcaaccttgagaaaacgccatgactataggaaggcctttatggagtttgaggcggaagtggttgccaaactcaccgagaaagagatgaatgcaataagcatcgaatacaagatagagatgagcaaagtgagaggtgttgtggaaaacgctaaaaagatcgtagagatcaagaaagcgtttgtgtcattagagaaatacctttggggatttgtgaaccacaaaccaatctccacgaactacaagcttggacacaagattccggtcaagacatcgaagtcggagagcatcagcaaagacatggttcgtcgaggcttccggttcgtgggtcccactgtggttcactcattcatgcaagccgctggtcttacaaacgaccacttgatcacttgctgtcgccacgctccttgcactctccttgcaaccaatccctaattattaatttttaatttaattgaaagtggtgtttttatttaactttcgagtgcaaaatgtaggtttaggagaaaagagattgcagttttttaaaattggcaatgtaagataaaccagctggtttgatttttttcttgtgtgtgaggtgtttaaaatcacatgtataatggtttttgatgtatgtgtggtgtggcaaattgaaatagtaattgattttcatttgatttatctattgttcaaaatttgtt

SEQ ID NO: 32766 - protein, 312 aa, Arabidopsis thaliana
  misc_feature (1)..(312): Ceres Seq. ID no. 13600998
MSKTEAISLTKRGMLPPSSCNSLMDRSESLKRDSVMGNGAAKVRGSLERKKSKSFKEGDSYSSWLITEAPGSIAAVRREQVAAQQALRKLKIAHYGRSKSTINFTSSKVVPLLNPNPNPHPQRCSFLTPTSDPIYVAYHDEEWGVPVHDDKTLFELLTLSGAQVGSDWTSTLRKRHDYRKAFMEFEAEVVAKLTEKEMNAISIEYKIEMSKVRGVVENAKKIVEIKKAFVSLEKYLWGFVNHKPISTNYKLGHKIPVKTSKSESISKDMVRRGFRFVGPTVVHSFMQAAGLTNDHLITCCRHAPCTLLATNP

SEQ ID NO: 32767 - protein, 299 aa, Arabidopsis thaliana
  misc_feature (1)..(299): Ceres Seq. ID no. 13600999
MLPPSSCNSLMDRSESLKRDSVMGNGAAKVRGSLERKKSKSFKEGDSYSSWLITEAPGSIAAVRREQVAAQQALRKLKIAHYGRSKSTINFTSSKVVPLLNPNPNPHPQRCSFLTPTSDPIYVAYHDEEWGVPVHDDKTLFELLTLSGAQVGSDWTSTLRKRHDYRKAFMEFEAEVVAKLTEKEMNAISIEYKIEMSKVRGVVENAKKIVEIKKAFVSLEKYLWGFVNHKPISTNYKLGHKIPVKTSKSESISKDMVRRGFRFVGPTVVHSFMQAAGLTNDHLITCCRHAPCTLLATNP

SEQ ID NO: 32768 - protein, 289 aa, Arabidopsis thaliana
  misc_feature (1)..(289): Ceres Seq. ID no. 13601000
MDRSESLKRDSVMGNGAAKVRGSLERKKSKSFKEGDSYSSWLITEAPGSIAAVRREQVAAQQALRKLKIAHYGRSKSTINFTSSKVVPLLNPNPNPHPQRCSFLTPTSDPIYVAYHDEEWGVPVHDDKTLFELLTLSGAQVGSDWTSTLRKRHDYRKAFMEFEAEVVAKLTEKEMNAISIEYKIEMSKVRGVVENAKKIVEIKKAFVSLEKYLWGFVNHKPISTNYKLGHKIPVKTSKSESISKDMVRRGFRFVGPTVVHSFMQAAGLTNDHLITCCRHAPCTLLATNP

SEQ ID NO: 32769 - DNA, 6308 bp, Arabidopsis thaliana
  misc_feature (1)..(6308): Ceres Seq. ID no. 13601005
cactctgcagtcactaaccatcttcttcttggaagattttgcttaaaggcgttagtaatggcgtctaaaggtggtaaatctaaacctgatatagtaatggcgtccaagagtgggaaatctaaacctgataatgaatccagagctaagcgtcagaagacgctcgaagctcctaaagaaccacgtcgtcctaaaactcactgggaccatgtattggaggagatggcttggctgtcaaaggactttgagtctgagaggaaatggaagctggcgcaggcgaagaaggttgctttgagagccagcaaaggaatgctagatcaggcatctagggaagaaaggaagctaaaggaagaagaacagcgacttcggaaagtagccctcaatatctcgaaagacatgaaaaagttttggatgaaagttgagaagctggtgctttacaagcatcagttggtacgcaatgagaagaagaagaaggctatggacaagcaacttgaatttctgttaggccaaactgagaggtactcaaccatgttggcagaaaatttagtggagccttataaacagggccaaaatactccttcaaaacctctactaactatcgaatcaaaaagtgatgaggagagggcagaacagatacctccagagataaattcttgtcttgaatcaggaagtcctgaactcgatgaggattatgatctaaaatctgaggatgagaccgaagatgatgaagatactattgaggaggatgaaaaacacttcaccaaacgtgaaagacaggaagagttggaagctttgcaaaatgaagtggatctaccagttgaggagctgctcagacgttatacctctggaagagttagccgagaaaccagcccagtaaaagatgaaaatgaggacaatctgacctcagttagccgagtaaccagcccagtaaaagatgaaaatcaggacaatctggcctcagtaggtcaagatcatggagaggcagacaagaacaatcttgcagcttctgaagaaactgaagggaacccaagtgttcgtcgttctaatgatagctatggtcatttggcaatatccgagacccattcacatgaccttgagccaggcatgacgactgcatctgtgaagtccagaaaggaagatcatacctatgattttaacgatgaacaggaagatgttgactttgttcttgccaatggtgaggaaaaggatgatgaggcgacattggctgtcgaagaggaactggcgaaagcagataatgaagatcatgtcgaagagattgccctgctgcaaaaagagagtgaaatgcctattgaagtactacttgcaaggtataaggaggatttcggtggcaaggatatatctgaggatgaatctgaatcttcatttgctgtatctgaagactctatagtagactctgacgaaaataggcagcaagctgatttagatgatgacaacgttgatttaacagaatgtaagctagatccagagccttgctcagaaaatgttgaaggcacattccatgaagtagcagaagataatgataaagatagtagtgataaaattgctgatgcagcagcagcagcaagatctgcccagccaactggatttacatactccacaacaaaagttcgaacgaaactgccgtttctacttaagcattctctgcgtgagtaccaacacattggtttggactggcttgtcacgatgtatgagaaaaagttgaacggtattctggctgatgaaatgggtcttggaaagacaattatgaccattgctcttctagctcaccttgcatgtgataagggaatatggggtccccatctgattgtggttcctacaagtgtgatgcttaattgggagactgagtttcttaaatggtgtcctgcatttaaaattctcacctactttggtagtgcaaaggagcggaaactcaagagacaaggatggatgaagcttaactcatttcatgtatgcataacaacctataggctagttattcaggacagtaaaatgttcaagcgcaagaagtggaaatacttgattcttgacgaagcccatttaattaagaattggaagtctcagagatggcagacactattgaacttcaattctaaacgcagaattttgttgactggtacacccctgcagaatgatcttatggaactgtggtcacttatgcactttctgatgccacatgtctttcagtctcaccaggaattcaaagactggttctgtaacccaatagcagggatggtcgagggacaagaaaaaatcaacaaagaagttattgatcgcttacataatgtcctccgtcctttccttctacggcgcctaaaaagggatgtggagaagcaacttccttcgaaacatgagcatgttattttctgtagactgtctaagaggcagcgcaacttgtatgaggacttcatagcaagcacagaaacacaggctacgcttaccagtggaagcttttttgggatgataagtatcataatgcagttgcggaaagtttgtaatcatcctgatctctttgagggtcgtcctattgtaagttcttttgatatggctggcattgatgtgcagttgagttcaacaatctgttcgctactattggaaagtccgttttccaaggttgatcttgaggctttgggattcttattcacccatcttgatttttctatgacttcttgggaaggagatgagatcaaagctatttcaacaccctcagaattaatcaaacagcgtgtgaacttgaaggatgatctagaagcaatccctttgagtccaaaaaaccgcaaaaatctgcaagggacaaatatttttgaagaaattcgtaaggctgtctttgaggaaaggatacaagaatctaaggatcgggcagcagccattgcatggtggaattctttgagatgccagagaaagccgacttactctacatcactaagaactcttttaaccattaagggtcctcttgatgatcttaaagctaactgttcatcttacatgtattcatcaatcctcgctgacatagtcctttcaccaatcgagcgttttcagaagatgattgagctagttgaagctttcacatttgcgattccagctgcacgagtgccttcacctacttgctggtgcagtaaaagtgactctcctgtttttcttagtccatcgtacaaggaaaaagttacagatttattgtcacctcttttatctccaattagacctgcaatcgttaggagacaagtatattttccagataggcgactgatacagtttgattgtggtaagctgcaggagcttgctatgttattgaggaaattaaaatttgggggtcacagagcgttgatattcacgcaaatgaccaagatgcttgacgtcttggaggctttcattaatttatatggttatacctacatgcgtcttgatggctctacacctccagaagagaggcagacgttaatgcagcggtttaatacaaatcccaagatctttcttttcattttgtcaacccgaagtgggggcgttggcatcaaccttgtgggtgcggacacagttatattctatgacagtgactggaatcctgctatggatcaacaagctcaagatcgctgccacaggataggtcagacacgtgaagtgcatatataccggttgataagtgagagcaccattgaggagaatatcttaaagaaagcaaaccagaagcgtgtgcttgataacctagtaattcaaaacggtgagtataacaccgaatttttcaagaagctcgatcccatggaattgttctctgggcataaggctctgactacaaaggatgaaaaggaaacaagcaagcattgtggggcggatatacctctatcaaatgcagatgttgaggctgctctaaaacaggccgaagatgaggcagattatatggctctcaaaagagtagaacaagaagaagctgtggacaatcaagagttcacagaagaacctgtagagagaccagaagacgatgagctagtaaatgaagatgacataaaggctgatgagcctgctgatcaaggtttagttgcagcagggccggccaaagaagaaatgtcattgttacatagtgatatcagggatgagagagctgttatcactacttcaagccaagaagatgacactgatgtattagatgatgtcaagcaaatggctgcagcagcggctgatgctggacaagctatctcatcttttgagaatcagctacgtcctattgatagatatgcgattagatttttagagctttgggaccccatcattgttgaggctgcaatggaaaatgaagcaggatttgaagagaaagaatgggaacttgaccacattgagaagtacaaggaggaaatggaagctgagattgatgatggggaagagcctcttgtttacgagaaatgggatgctgattttgcaactgaggcatacaggcagcaagtggaagtcttagctcagcaccagttaatggaagatttggaaaatgaagctagagagagggaagcggcagaggtggctgaaatggttttgacacagaacgaaagtgctcatgtactgaagcctaagaagaagaaaaaggcgaagaaagccaaatataaatccctgaagaaaggatcactggctgccgaatcaaaacatgtgaagtcagttgtgaaaattgaagattctactgatgatgataatgaagaattcggctatgtgagtagcagtgactcggatatggttacaccgctttcgcggatgcatatgaagggcaagaaaagagatttaattgttgacactgatgaagagaagacctcaaagaagaaagcaaagaagcacaagaagtctctcccgaattcagatatcaaatataagcaaacaagtgcactacttgatgaactggaaccatcaaagccgtctgacagtatggttgttgataatgagttgaaattgacgaacaggggtaaaactgtagggaaaaaattcatcacttccatgccaataaagcgtgttcttatgatcaagccagagaaattgaagaaaggaaatctgtggtctagagattgtgttccctcgcctgattcttggttgccgcaggaagatgctatattgtgtgccatggttcatgaatatgggcctaactggaattttgttagcggaactctttatggaatgacagctggtggggcttacagaggacggtatcggcatcctgcatattgttgtgagagatatagagagcttattcaacgacatattttgtctgcttccgacagtgcagtgaacgagaagaacctcaacacaggttctgggaaggctctccttaaagtcactgaggaaaatattcggacactcctaaatgttgcagctgagcagccagatacggagatgctcctacaaaaacatttttcttgcttgctgtcatcaatttggaggacgtctacccgcactgggaatgatcaaatgctctccttaaacagtcctattttcaacagacagtttatgggttccgtgaatcacacccaagatttagctagaaagccttggcaggggatgaaggtcaccagcttaagtagaaagttgttagaatccgctctccaggattctggcccgagtcagccagacaatactatttcccgttctaggttgcaggagactcaacctatcaataaattgggattagagttaaccttggaattcccacgtggcaatgatgattccctgaatcagtttccaccgatgattagtctgtccattgatgggtcagattcattaaattatgtgaacgagcccccaggggaagatgttctaaaaggttctagggttgctgcagagaaccgttacaggaatgctgcaaatgcttgtattgaagattcatttggatgggcttcaaacacgttcccagccaatgatctgaagtcaagaacaggcacgaaagcacagtccctggggaaacacaagctatccgcctcagactcagccaagtctacaaaaagcaaacaccgcaaactcttagcagagcaattggaaggggcatgggttaggccaaatgatccgaatctcaagtttgatttcacacctggtgatagggaggaggaggaggagcaggaggtggatgagaaagcgaattcagcagagatagagatgataagctgttcacaatggtatgatccattctttacctcaggccttgatgattgctcattagcttcggatatctcagaaatagagtagtaaaaaagccttttgtaaaagtaaaaacctgcttgcagaagaaaatgctgatgattgtggatgatcattttcttaacctcccactt

SEQ ID NO: 32770 - protein, 2073 aa, Arabidopsis thaliana
  misc_feature (1)..(2073): Ceres Seq. ID no. 13601006
HSAVTNHLLLGRFCLKALVMASKGGKSKPDIVMASKSGKSKPDNESRAKRQKTLEAPKEPRRPKTHWDHVLEEMAWLSKDFESERKWKLAQAKKVALRASKGMLDQASREERKLKEEEQRLRKVALNISKDMKKFWMKVEKLVLYKHQLVRNEKKKKAMDKQLEFLLGQTERYSTMLAENLVEPYKQGQNTPSKPLLTIESKSDEERAEQIPPEINSCLESGSPELDEDYDLKSEDETEDDEDTIEEDEKHFTKRERQEELEALQNEVDLPVEELLRRYTSGRVSRETSPVKDENEDNLTSVSRVTSPVKDENQDNLASVGQDHGEADKNNLAASEETEGNPSVRRSNDSYGHLAISETHSHDLEPGMTTASVKSRKEDHTYDFNDEQEDVDFVLANGEEKDDEATLAVEEELAKADNEDHVEEIALLQKESEMPIEVLLARYKEDFGGKDISEDESESSFAVSEDSIVDSDENRQQADLDDDNVDLTECKLDPEPCSENVEGTFHEVAEDNDKDSSDKIADAAAAARSAQPTGFTYSTTKVRTKLPFLLKHSLREYQHIGLDWLVTMYEKKLNGILADEMGLGKTIMTIALLAHLACDKGIWGPHLIVVPTSVMLNWETEFLKWCPAFKILTYFGSAKERKLKRQGWMKLNSFHVCITTYRLVIQDSKMFKRKKWKYLILDEAHLIKNWKSQRWQTLLNFNSKRRILLTGTPLQNDLMELWSLMHFLMPHVFQSHQEFKDWFCNPIAGMVEGQEKINKEVIDRLHNVLRPFLLRRLKRDVEKQLPSKHEHVIFCRLSKRQRNLYEDFIASTETQATLTSGSFFGMISIIMQLRKVCNHPDLFEGRPIVSSFDMAGIDVQLSSTICSLLLESPFSKVDLEALGFLFTHLDFSMTSWEGDEIKAISTPSELIKQRVNLKDDLEAIPLSPKNRKNLQGTNIFEEIRKAVFEERIQESKDRAAAIAWWNSLRCQRKPTYSTSLRTLLTIKGPLDDLKANCSSYMYSSILADIVLSPIERFQKMIELVEAFTFAIPAARVPSPTCWCSKSDSPVFLSPSYKEKVTDLLSPLLSPIRPAIVRRQVYFPDRRLIQFDCGKLQELAMLLRKLKFGGHRALIFTQMTKMLDVLEAFINLYGYTYMRLDGSTPPEERQTLMQRFNTNPKIFLFILSTRSGGVGINLVGADTVIFYDSDWNPAMDQQAQDRCHRIGQTREVHIYRLISESTIEENILKKANQKRVLDNLVIQNGEYNTEFFKKLDPMELFSGHKALTTKDEKETSKHCGADIPLSNADVEAALKQAEDEADYMALKRVEQEEAVDNQEFTEEPVERPEDDELVNEDDIKADEPADQGLVAAGPAKEEMSLLHSDIRDERAVITTSSQEDDTDVLDDVKQMAAAAADAGQAISSFENQLRPIDRYAIRFLELWDPIIVEAAMENEAGFEEKEWELDHIEKYKEEMEAEIDDGEEPLVYEKWDADFATEAYRQQVEVLAQHQLMEDLENEAREREAAEVAEMVLTQNESAHVLKPKKKKKAKKAKYKSLKKGSLAAESKHVKSVVKIEDSTDDDNEEFGYVSSSDSDMVTPLSRMHMKGKKRDLIVDTDEEKTSKKKAKKHKKSLPNSDIKYKQTSALLDELEPSKPSDSMVVDNELKLTNRGKTVGKKFITSMPIKRVLMIKPEKLKKGNLWSRDCVPSPDSWLPQEDAILCAMVHEYGPNWNFVSGTLYGMTAGGAYRGRYRHPAYCCERYRELIQRHILSASDSAVNEKNLNTGSGKALLKVTEENIRTLLNVAAEQPDTEMLLQKHFSCLLSSIWRTSTRTGNDQMLSLNSPIFNRQFMGSVNHTQDLARKPWQGMKVTSLSRKLLESALQDSGPSQPDNTISRSRLQETQPINKLGLELTLEFPRGNDDSLNQFPPMISLSIDGSDSLNYVNEPPGEDVLKGSRVAAENRYRNAANACIEDSFGWASNTFPANDLKSRTGTKAQSLGKHKLSASDSAKSTKSKHRKLLAEQLEGAWVRPNDPNLKFDFTPGDREEEEEQEVDEKANSAEIEMISCSQWYDPFFTSGLDDCSLASDISEIE

SEQ ID NO: 32771 - protein, 2054 aa, Arabidopsis thaliana
  misc_feature (1)..(2054): Ceres Seq. ID no. 13601007
MASKGGKSKPDIVMASKSGKSKPDNESRAKRQKTLEAPKEPRRPKTHWDHVLEEMAWLSKDFESERKWKLAQAKKVALRASKGMLDQASREERKLKEEEQRLRKVALNISKDMKKFWMKVEKLVLYKHQLVRNEKKKKAMDKQLEFLLGQTERYSTMLAENLVEPYKQGQNTPSKPLLTIESKSDEERAEQIPPEINSCLESGSPELDEDYDLKSEDETEDDEDTIEEDEKHFTKRERQEELEALQNEVDLPVEELLRRYTSGRVSRETSPVKDENEDNLTSVSRVTSPVKDENQDNLASVGQDHGEADKNNLAASEETEGNPSVRRSNDSYGHLAISETHSHDLEPGMTTASVKSRKEDHTYDFNDEQEDVDFVLANGEEKDDEATLAVEEELAKADNEDHVEEIALLQKESEMPIEVLLARYKEDFGGKDISEDESESSFAVSEDSIVDSDENRQQADLDDDNVDLTECKLDPEPCSENVEGTFHEVAEDNDKDSSDKIADAAAAARSAQPTGFTYSTTKVRTKLPFLLKHSLREYQHIGLDWLVTMYEKKLNGILADEMGLGKTIMTIALLAHLACDKGIWGPHLIVVPTSVMLNWETEFLKWCPAFKILTYFGSAKERKLKRQGWMKLNSFHVCITTYRLVIQDSKMFKRKKWKYLILDEAHLIKNWKSQRWQTLLNFNSKRRILLTGTPLQNDLMELWSLMHFLMPHVFQSHQEFKDWFCNPIAGMVEGQEKINKEVIDRLHNVLRPFLLRRLKRDVEKQLPSKHEHVIFCRLSKRQRNLYEDFIASTETQATLTSGSFFGMISIIMQLRKVCNHPDLFEGRPIVSSFDMAGIDVQLSSTICSLLLESPFSKVDLEALGFLFTHLDFSMTSWEGDEIKAISTPSELIKQRVNLKDDLEAIPLSPKNRKNLQGTNIFEEIRKAVFEERIQESKDRAAAIAWWNSLRCQRKPTYSTSLRTLLTIKGPLDDLKANCSSYMYSSILADIVLSPIERFQKMIELVEAFTFAIPAARVPSPTCWCSKSDSPVFLSPSYKEKVTDLLSPLLSPIRPAIVRRQVYFPDRRLIQFDCGKLQELAMLLRKLKFGGHRALIFTQMTKMLDVLEAFINLYGYTYMRLDGSTPPEERQTLMQRFNTNPKIFLFILSTRSGGVGINLVGADTVIFYDSDWNPAMDQQAQDRCHRIGQTREVHIYRLISESTIEENILKKANQKRVLDNLVIQNGEYNTEFFKKLDPMELFSGHKALTTKDEKETSKHCGADIPLSNADVEAALKQAEDEADYMALKRVEQEEAVDNQEFTEEPVERPEDDELVNEDDIKADEPADQGLVAAGPAKEEMSLLHSDIRDERAVITTSSQEDDTDVLDDVKQMAAAAADAGQAISSFENQLRPIDRYAIRFLELWDPIIVEAAMENEAGFEEKEWELDHIEKYKEEMEAEIDDGEEPLVYEKWDADFATEAYRQQVEVLAQHQLMEDLENEAREREAAEVAEMVLTQNESAHVLKPKKKKKAKKAKYKSLKKGSLAAESKHVKSVVKIEDSTDDDNEEFGYVSSSDSDMVTPLSRMHMKGKKRDLIVDTDEEKTSKKKAKKHKKSLPNSDIKYKQTSALLDELEPSKPSDSMVVDNELKLTNRGKTVGKKFITSMPIKRVLMIKPEKLKKGNLWSRDCVPSPDSWLPQEDAILCAMVHEYGPNWNFVSGTLYGMTAGGAYRGRYRHPAYCCERYRELIQRHILSASDSAVNEKNLNTGSGKALLKVTEENIRTLLNVAAEQPDTEMLLQKHFSCLLSSIWRTSTRTGNDQMLSLNSPIFNRQFMGSVNHTQDLARKPWQGMKVTSLSRKLLESALQDSGPSQPDNTISRSRLQETQPINKLGLELTLEFPRGNDDSLNQFPPMISLSIDGSDSLNYVNEPPGEDVLKGSRVAAENRYRNAANACIEDSFGWASNTFPANDLKSRTGTKAQSLGKHKLSASDSAKSTKSKHRKLLAEQLEGAWVRPNDPNLKFDFTPGDREEEEEQEVDEKANSAEIEMISCSQWYDPFFTSGLDDCSLASDISEIE

SEQ ID NO: 32772 - protein, 2041 aa, Arabidopsis thaliana
  misc_feature (1)..(2041): Ceres Seq. ID no. 13601008
MASKSGKSKPDNESRAKRQKTLEAPKEPRRPKTHWDHVLEEMAWLSKDFESERKWKLAQAKKVALRASKGMLDQASREERKLKEEEQRLRKVALNISKDMKKFWMKVEKLVLYKHQLVRNEKKKKAMDKQLEFLLGQTERYSTMLAENLVEPYKQGQNTPSKPLLTIESKSDEERAEQIPPEINSCLESGSPELDEDYDLKSEDETEDDEDTIEEDEKHFTKRERQEELEALQNEVDLPVEELLRRYTSGRVSRETSPVKDENEDNLTSVSRVTSPVKDENQDNLASVGQDHGEADKNNLAASEETEGNPSVRRSNDSYGHLAISETHSHDLEPGMTTASVKSRKEDHTYDFNDEQEDVDFVLANGEEKDDEATLAVEEELAKADNEDHVEEIALLQKESEMPIEVLLARYKEDFGGKDISEDESESSFAVSEDSIVDSDENRQQADLDDDNVDLTECKLDPEPCSENVEGTFHEVAEDNDKDSSDKIADAAAAARSAQPTGFTYSTTKVRTKLPFLLKHSLREYQHIGLDWLVTMYEKKLNGILADEMGLGKTIMTIALLAHLACDKGIWGPHLIVVPTSVMLNWETEFLKWCPAFKILTYFGSAKERKLKRQGWMKLNSFHVCITTYRLVIQDSKMFKRKKWKYLILDEAHLIKNWKSQRWQTLLNFNSKRRILLTGTPLQNDLMELWSLMHFLMPHVFQSHQEFKDWFCNPIAGMVEGQEKINKEVIDRLHNVLRPFLLRRLKRDVEKQLPSKHEHVIFCRLSKRQRNLYEDFIASTETQATLTSGSFFGMISIIMQLRKVCNHPDLFEGRPIVSSFDMAGIDVQLSSTICSLLLESPFSKVDLEALGFLFTHLDFSMTSWEGDEIKAISTPSELIKQRVNLKDDLEAIPLSPKNRKNLQGTNIFEEIRKAVFEERIQESKDRAAAIAWWNSLRCQRKPTYSTSLRTLLTIKGPLDDLKANCSSYMYSSILADIVLSPIERFQKMIELVEAFTFAIPAARVPSPTCWCSKSDSPVFLSPSYKEKVTDLLSPLLSPIRPAIVRRQVYFPDRRLIQFDCGKLQELAMLLRKLKFGGHRALIFTQMTKMLDVLEAFINLYGYTYMRLDGSTPPEERQTLMQRFNTNPKIFLFILSTRSGGVGINLVGADTVIFYDSDWNPAMDQQAQDRCHRIGQTREVHIYRLISESTIEENILKKANQKRVLDNLVIQNGEYNTEFFKKLDPMELFSGHKALTTKDEKETSKHCGADIPLSNADVEAALKQAEDEADYMALKRVEQEEAVDNQEFTEEPVERPEDDELVNEDDIKADEPADQGLVAAGPAKEEMSLLHSDIRDERAVITTSSQEDDTDVLDDVKQMAAAAADAGQAISSFENQLRPIDRYAIRFLELWDPIIVEAAMENEAGFEEKEWELDHIEKYKEEMEAEIDDGEEPLVYEKWDADFATEAYRQQVEVLAQHQLMEDLENEAREREAAEVAEMVLTQNESAHVLKPKKKKKAKKAKYKSLKKGSLAAESKHVKSVVKIEDSTDDDNEEFGYVSSSDSDMVTPLSRMHMKGKKRDLIVDTDEEKTSKKKAKKHKKSLPNSDIKYKQTSALLDELEPSKPSDSMVVDNELKLTNRGKTVGKKFITSMPIKRVLMIKPEKLKKGNLWSRDCVPSPDSWLPQEDAILCAMVHEYGPNWNFVSGTLYGMTAGGAYRGRYRHPAYCCERYRELIQRHILSASDSAVNEKNLNTGSGKALLKVTEENIRTLLNVAAEQPDTEMLLQKHFSCLLSSIWRTSTRTGNDQMLSLNSPIFNRQFMGSVNHTQDLARKPWQGMKVTSLSRKLLESALQDSGPSQPDNTISRSRLQETQPINKLGLELTLEFPRGNDDSLNQFPPMISLSIDGSDSLNYVNEPPGEDVLKGSRVAAENRYRNAANACIEDSFGWASNTFPANDLKSRTGTKAQSLGKHKLSASDSAKSTKSKHRKLLAEQLEGAWVRPNDPNLKFDFTPGDREEEEEQEVDEKANSAEIEMISCSQWYDPFFTSGLDDCSLASDISEIE

SEQ ID NO: 32773 - DNA, 1142 bp, Arabidopsis thaliana
  misc_feature (1)..(1142): Ceres Seq. ID no. 13601020
attctctaggcttttttatattctgaaagttttgattttttgtatcttgttttgtttctcaatcatcaatttgtggtagtagctcactagcaaacaatggaggggaggttgaataatatgtggaggttgactgtgaatgagagcaaattcgttgaatctgcgttgcaatctgagctcagagtcgatggtcgtggcctttatgattaccgcaagcttactattaagtttggcaaggaatatggcagctcacaagttcaactgggtcagactcatgtaatggcttttgtgactgctcagctagtacaaccttacaaagacagacctagtgaaggctccttctctatcttcaccgagttttctccaatggctgatccatcgtttgagccagggcatcctggtgaatctgctgttgagcttggccgtattatagaccgtgctctacgagaaagccgtgcagtagatacagagtcgctttgtgttctagccggaaagctggtttggtctgttcgcattgatcttcacattttggacaatggagggaacttggttgatgctgctaatgttgctgccttagccgcactcatgactttcaggagacctgattgcactgtaggaggggacaacagtcaagacgtgatcatacatccacccgaagaaagggaaccacttcctttgataatacatcatctcccaatagccttcacgtttggattttttaataaaggcagtatcttggtgatggacccaacttacgttgaagaagctgttatgtgtgggagaatgactgtgacagtcaatgccaatggcgatatatgcgcaatccaaaaaccaggagaagaaggcgtgaaccagagtgtaatccttcattgcctgcgtcttgcttcttcaagagcttctgcaacaacaaagataattagagatgcagttgaagcatacaaccgtgagaggagctcacagaaggtgaagcggcatcatactttggctaagtctgaagttttgggacctattgtagttgtgtaggaagagacataaataaaacatttgctgtggtcgtcgattgtaaataaagattttagttgtagaaatcttatcagcaacactaagctataaaaacgtcgatatgatcaagacatgttgagact

SEQ ID NO: 32774 - protein, 307 aa, Arabidopsis thaliana
  misc_feature (1)..(307): Ceres Seq. ID no. 13601021
MEGRLNNMWRLTVNESKFVESALQSELRVDGRGLYDYRKLTIKFGKEYGSSQVQLGQTHVMAFVTAQLVQPYKDRPSEGSFSIFTEFSPMADPSFEPGHPGESAVELGRIIDRALRESRAVDTESLCVLAGKLVWSVRIDLHILDNGGNLVDAANVAALAALMTFRRPDCTVGGDNSQDVIIHPPEEREPLPLIIHHLPIAFTFGFFNKGSILVMDPTYVEEAVMCGRMTVTVNANGDICAIQKPGEEGVNQSVILHCLRLASSRASATTKIIRDAVEAYNRERSSQKVKRHHTLAKSEVLGPIVVV

SEQ ID NO: 32775 - protein, 300 aa, Arabidopsis thaliana
  misc_feature (1)..(300): Ceres Seq. ID no. 13601022
MWRLTVNESKFVESALQSELRVDGRGLYDYRKLTIKFGKEYGSSQVQLGQTHVMAFVTAQLVQPYKDRPSEGSFSIFTEFSPMADPSFEPGHPGESAVELGRIIDRALRESRAVDTESLCVLAGKLVWSVRIDLHILDNGGNLVDAANVAALAALMTFRRPDCTVGGDNSQDVIIHPPEEREPLPLIIHHLPIAFTFGFFNKGSILVMDPTYVEEAVMCGRMTVTVNANGDICAIQKPGEEGVNQSVILHCLRLASSRASATTKIIRDAVEAYNRERSSQKVKRHHTLAKSEVLGPIVVV

SEQ ID NO: 32776 - protein, 247 aa, Arabidopsis thaliana
  misc_feature (1)..(247): Ceres Seq. ID no. 13601023
MAFVTAQLVQPYKDRPSEGSFSIFTEFSPMADPSFEPGHPGESAVELGRIIDRALRESRAVDTESLCVLAGKLVWSVRIDLHILDNGGNLVDAANVAALAALMTFRRPDCTVGGDNSQDVIIHPPEEREPLPLIIHHLPIAFTFGFFNKGSILVMDPTYVEEAVMCGRMTVTVNANGDICAIQKPGEEGVNQSVILHCLRLASSRASATTKIIRDAVEAYNRERSSQKVKRHHTLAKSEVLGPIVVV

SEQ ID NO: 32777 - DNA, 834 bp, Arabidopsis thaliana
  misc_feature (1)..(834): Ceres Seq. ID no. 13601052
atataagtctttctcactccttctctttcctttgtgattcatatccttcttcttctccaagaacctctctctctttctgcttctctatattttaacactttcttccgaatttgcccctcaagttttattttaattgctaaaatggctggaaccctagttaactccgccgggagattctcaccgggaaattgtattcttcctcaacagagaacagccagattctacagcggaaccgcgagatttcccaccggagctccgtcgtttaaggcttcagctcagacgcttaacgccgagccagctgtaacggaatccgttcgtcggagagtttctagcctctacgaattactgaaagtgaatgaaacggcgtccttgacggagatcaagacggcgtaccggagcttagctaaagtatatcatccagatgcgtcggaatcggacggtcgagattttatggagattcacaaagcttacgcgacacttgcggatccgactacaagagcgatttacgactcgacgcttagagtaccacggagacgggtacacgccggagcgatgggtcggtcggggcgggtttacgctacgacccggagatgggagacggatcagtgttggtgattttaggcttcctatgattttgcagcagcgaaagggcactttttgacttactttcccctttgattacgtttttttttttccttgtcatatctttggaaaattaaggggaaattaagtttaatccgctctttttttttgtttttcttttaacttaagcagttaacaatgtataaagaagttatgagtagagaaatgtatatgattttagttttctccttt

SEQ ID NO: 32778 - protein, 157 aa, Arabidopsis thaliana
  misc_feature (1)..(157): Ceres Seq. ID no. 13601053
MAGTLVNSAGRFSPGNCILPQQRTARFYSGTARFPTGAPSFKASAQTLNAEPAVTESVRRRVSSLYELLKVNETASLTEIKTAYRSLAKVYHPDASESDGRDFMEIHKAYATLADPTTRAIYDSTLRVPRRRVHAGAMGRSGRVYATTRRWETDQCW

SEQ ID NO: 32779 - protein, 79 aa, Arabidopsis thaliana
  misc_feature (1)..(79): Ceres Seq. ID no. 13601054
MRRNRTVEILWRFTKLTRHLRIRLQERFTTRRLEYHGDGYTPERWVGRGGFTLRPGDGRRISVGDFRLPMILQQRKGTF

SEQ ID NO: 32780 - DNA, 1365 bp, Arabidopsis thaliana
  misc_feature (1)..(1365): Ceres Seq. ID no. 13601063
gactactcatatgtgtcgcccagatttgaagatcggagatatgaatctcttctttctctggatttgaaagttcgataaaaatctactgatacatcgacttctggaagcgatctcgatctctctagaattgtttcgacgacgaagatgaagaagattcaaattggtgcggtggcgctattggtgtttctatctgtggcctctctctttgaaatcggattggcttctccgaacacagttcctgctttcctctggtctccgcatctccagtctgctaatggtgaattggatgaggctgtaaattatcaggtcatgtctgcaaaggatctagttggttctgttttcactcaaggaggttggtcaaactttctgtgctcagagaagaagcttgagcaacctgttgatgttgcacttgtgttcataggcagagagttactgtcttctgatgtttcttcaaaaaggaactcagatcctgcccttgttaacacattgaataatctatttacagcttccaacttctcattggcattcccatatattgctgctccagaggaagaaaggatggagaatttgttactttcagggcttaaagaagcttgtcccaacaatgtaggagtcagcaatatcgtgttctcagattcgtgctttgttgaggatggaacaattcagaaactttcagacttgcagtctttcaaagatcatttgcttgctagaagagaaacaaggaaagaaggagaaactgacttggttgtgctctgttccgagggttctgaatcgaatagtcaagctggacagtcacattcagagcgtgaaagcttcttggaacttgttagttctgtagaacaatccggcagtaaatatacagctctttatgtttctgatccttattggtacacatcttacaaaactctccaaaggtttctagctgaaactgctaaaggaaacagtactcctgaaattgctactggctgtgatgaactctgcaaatttaagtcatcacttttggagggcatactagtgggaatcgtttttcttctcatcttgatcagtggactttgctgtatggcgggtatcgatacaccgactagattcgagactcctcaagattcttaagctgttgaccttaagagccatccccaccttttgctttgcttttgacgagtcttttcttgtgcatagtgcgcattgtggaaggtacttcaatgtcgatttgttacattattacttcaaaacaaaatctgcatatgccataaaatccccttgtatcatttattcatcttgtttgtgagtctttcttaaacgtcataaattaataatggagaacgagtaaaaaaccagagatacatacactggagaacggattacatt

SEQ ID NO: 32781 - protein, 321 aa, Arabidopsis thaliana
  misc_feature (1)..(321): Ceres Seq. ID no. 13601064
MKKIQIGAVALLVFLSVASLFEIGLASPNTVPAFLWSPHLQSANGELDEAVNYQVMSAKDLVGSVFTQGGWSNFLCSEKKLEQPVDVALVFIGRELLSSDVSSKRNSDPALVNTLNNLFTASNFSLAFPYIAAPEEERMENLLLSGLKEACPNNVGVSNIVFSDSCFVEDGTIQKLSDLQSFKDHLLARRETRKEGETDLVVLCSEGSESNSQAGQSHSERESFLELVSSVEQSGSKYTALYVSDPYWYTSYKTLQRFLAETAKGNSTPEIATGCDELCKFKSSLLEGILVGIVFLLILISGLCCMAGIDTPTRFETPQDS

SEQ ID NO: 32782 - protein, 266 aa, Arabidopsis thaliana
  misc_feature (1)..(266): Ceres Seq. ID no. 13601065
MSAKDLVGSVFTQGGWSNFLCSEKKLEQPVDVALVFIGRELLSSDVSSKRNSDPALVNTLNNLFTASNFSLAFPYIAAPEEERMENLLLSGLKEACPNNVGVSNIVFSDSCFVEDGTIQKLSDLQSFKDHLLARRETRKEGETDLVVLCSEGSESNSQAGQSHSERESFLELVSSVEQSGSKYTALYVSDPYWYTSYKTLQRFLAETAKGNSTPEIATGCDELCKFKSSLLEGILVGIVFLLILISGLCCMAGIDTPTRFETPQDS

SEQ ID NO: 32783 - protein, 183 aa, Arabidopsis thaliana
  misc_feature (1)..(183): Ceres Seq. ID no. 13601066
MENLLLSGLKEACPNNVGVSNIVFSDSCFVEDGTIQKLSDLQSFKDHLLARRETRKEGETDLVVLCSEGSESNSQAGQSHSERESFLELVSSVEQSGSKYTALYVSDPYWYTSYKTLQRFLAETAKGNSTPEIATGCDELCKFKSSLLEGILVGIVFLLILISGLCCMAGIDTPTRFETPQDS

SEQ ID NO: 32784 - DNA, 1052 bp, Arabidopsis thaliana
  misc_feature (1)..(1052): Ceres Seq. ID no. 13601075
cctagtccaaaaatttctcatactataaaatgatttttttttttgcttcgctccctctttttcacttcgttaacggccccgcctccactctatcctaccgccgacgtccgtgatcgccgaaatgactgaagcagagtccaagactgttgttcctgagtcagtgttgaagaagagaaagagggaggaagaatgggcacttgccaagaaacaggagcttgaggctgccaaaaagcagaatgctgagaagaggaaactcatatttaaccgggctaaacagtactccaaggagtaccaggagaaagaaagggaattaatccagctgaagcgtgaggcaaaattgaaaggaggcttttatgttgacccagaagctaaactgcttttcattatccgtatccgtggtatcaatgccattgacccaaagacaaagaagattttgcaacttttgcgtttaagacagattttcaatggtgtgttcttgaaggtcaacaaggcaaccattaacatgcttcgccgtgttgaaccctatgtaacctatggatacccgaacttaaaaagtgtgaaggaattgatttacaaacgaggttttggaaagcttaaccaccagaggactgccttaacagacaattctattgtagatcaggggctaggaaagcatggcatcatctgcgttgaggatctgatccatgagatcatgacggttgggccacatttcaaggaagccaataactttttgtggccattccagttgaaggctccattgggagggatgaagaagaagaggaaccattacgtggaaggaggagatgctggaaaccgcgagaacttcatcaacgagctcgttaggagaatgaactgaagcgtaagcgttattgctctgaaactccctaggaaacgttttgctataggtggaaaacttctgttcgcttgcttgtgttgccattgaggcgaagtaaacatttacggtgaaagactttgatattttataagtttgaaattgtaagaacacatcatttatttccttccacattacatcgtcacttgcattgcatttt

SEQ ID NO: 32785 - protein, 244 aa, Arabidopsis thaliana
  misc_feature (1)..(244): Ceres Seq. ID no. 13601076
MTEAESKTVVPESVLKKRKREEEWALAKKQELEAAKKQNAEKRKLIFNRAKQYSKEYQEKERELIQLKREAKLKGGFYVDPEAKLLFIIRIRGINAIDPKTKKILQLLRLRQIFNGVFLKVNKATINMLRRVEPYVTYGYPNLKSVKELIYKRGFGKLNHQRTALTDNSIVDQGLGKHGIICVEDLIHEIMTVGPHFKEANNFLWPFQLKAPLGGMKKKRNHYVEGGDAGNRENFINELVRRMN

SEQ ID NO: 32786 - DNA, 837 bp, Arabidopsis thaliana
  misc_feature (1)..(837): Ceres Seq. ID no. 13601081
ctatagattattcaaaaagatgttctgaagacagattttcctcactttgatctcgtggttgcaaatattccttacaacatatcttcccctcttgtggccaagcttgtatacggctccaatacttttcgaagcgccacactcttgcttcaaaaggaattctcccgccggctcctggcaaatccaggagattccgatttcaatagattggcggtgaacgttaagttagtagctgatgttaaatttgtgatggatgtaagtaaaagagagtttgttccacctcctaaagttgattcatctgtaattaggattacaccaaaggagataataccggatgttaatgttcaagaatggttggcattcactcgcacgtgtttcgggaagaagaataagacgcttggttccatgtttaggcagaagaaaaaggtcatggaattgcagagtttgtctgcagggaggcatggctcgaatgttgaggttatgaatcagacaggtggtgattctgacagtgatgttgaagaagatgggaaagatgatttgttgtgtttggatacagatgcaagtatgttcaaggaaagggtaattgaaattctgagaacaaatgggttcgaagagaagagaccatccaagctttcacatcgtgagttgttacatttgctttctttgtttaaccaagctggaatttttttccatgatattacatcattacaaatggatctacacgaataatgataagttttctttaatgttttatgtttttggtcgaaccctttgaatttatttttcttacaaattggaagattacagtaaaagctacttaatgcagtaatttcggaaggg

SEQ ID NO: 32787 - protein, 159 aa, Arabidopsis thaliana
  misc_feature (1)..(159): Ceres Seq. ID no. 13601082
MDVSKREFVPPPKVDSSVIRITPKEIIPDVNVQEWLAFTRTCFGKKNKTLGSMFRQKKKVMELQSLSAGRHGSNVEVMNQTGGDSDSDVEEDGKDDLLCLDTDASMFKERVIEILRTNGFEEKRPSKLSHRELLHLLSLFNQAGIFFHDITSLQMDLHE

SEQ ID NO: 32788 - protein, 107 aa, Arabidopsis thaliana
  misc_feature (1)..(107): Ceres Seq. ID no. 13601083
MFRQKKKVMELQSLSAGRHGSNVEVMNQTGGDSDSDVEEDGKDDLLCLDTDASMFKERVIEILRTNGFEEKRPSKLSHRELLHLLSLFNQAGIFFHDITSLQMDLHE

SEQ ID NO: 32789 - protein, 99 aa, Arabidopsis thaliana
  misc_feature (1)..(99): Ceres Seq. ID no. 13601084
MELQSLSAGRHGSNVEVMNQTGGDSDSDVEEDGKDDLLCLDTDASMFKERVIEILRTNGFEEKRPSKLSHRELLHLLSLFNQAGIFFHDITSLQMDLHE

SEQ ID NO: 32790 - DNA, 1046 bp, Arabidopsis thaliana
  misc_feature (1)..(1046): Ceres Seq. ID no. 13601085
gattagtccggattgcatctaaggattcgttgatggcggcgtcgtggcagtgggaaaatgccaccgccggcgccgtcgctggattcgccaccgtagctgctatgcactctcttgatgttgttcgtacgagattccaagtcaacgacggaagagggtcaagtctgccgacgtacaagaacactgctcacgctgtcttcaccattgcccgtctcgagggtttgagagggctttatgcaggcttcttccctgcagttatcggttctactgtttcctggggcttatacttctttttttatggaagagccaagcagaggtacgctagaggcagggacgatgagaaactcagccctgctctccaccttgcttctgctgctgaagcaggggccttggtctgtttatgcacaaatcctatttggcttgtcaaaacaaggttacagcttcagacacctcttcatcaaactcaaccatactcagggctattagatgcctttagaaccatagtgaaagaggaaggacccagggcgctctacaagggtattgtccctggtcttgtactggtttctcatggtgctattcagttcacagcttatgaggaactccgtaaaatcattgtggatttgaaagaaaggagaagaaagtccgaatccactgacaatctattgaactcagcagattatgctgcacttggtggctcctccaaagtcgctgcagttcttcttacgtatccatttcaagttatacgagcacgattacagcaacgacctagtaccaacggaatcccaagatatatagacagcttacatgtcatcagagaaaccgcgagatatgaaggtctcaggggtttctacaggggactaacggctaatcttttgaaaaatgtacctgcgtcttccatcacattcatcgtctatgaaaacgttctgaaattgctaaaacagcatccaacaacaaaagattagactcttcctcttcctttaccgttatttcttagactcaacacgcacgcggttgacttgtcactcccaatactagagaattattctttg

SEQ ID NO: 32791 - protein, 318 aa, Arabidopsis thaliana
  misc_feature (1)..(318): Ceres Seq. ID no. 13601086
LVRIASKDSLMAASWQWENATAGAVAGFATVAAMHSLDVVRTRFQVNDGRGSSLPTYKNTAHAVFTIARLEGLRGLYAGFFPAVIGSTVSWGLYFFFYGRAKQRYARGRDDEKLSPALHLASAAEAGALVCLCTNPIWLVKTRLQLQTPLHQTQPYSGLLDAFRTIVKEEGPRALYKGIVPGLVLVSHGAIQFTAYEELRKIIVDLKERRRKSESTDNLLNSADYAALGGSSKVAAVLLTYPFQVIRARLQQRPSTNGIPRYIDSLHVIRETARYEGLRGFYRGLTANLLKNVPASSITFIVYENVLKLLKQHPTTKD

SEQ ID NO: 32792 - protein, 308 aa, Arabidopsis thaliana
  misc_feature (1)..(308): Ceres Seq. ID no. 13601087
MAASWQWENATAGAVAGFATVAAMHSLDVVRTRFQVNDGRGSSLPTYKNTAHAVFTIARLEGLRGLYAGFFPAVIGSTVSWGLYFFFYGRAKQRYARGRDDEKLSPALHLASAAEAGALVCLCTNPIWLVKTRLQLQTPLHQTQPYSGLLDAFRTIVKEEGPRALYKGIVPGLVLVSHGAIQFTAYEELRKIIVDLKERRRKSESTDNLLNSADYAALGGSSKVAAVLLTYPFQVIRARLQQRPSTNGIPRYIDSLHVIRETARYEGLRGFYRGLTANLLKNVPASSITFIVYENVLKLLKQHPTTKD

SEQ ID NO: 32793 - protein, 285 aa, Arabidopsis thaliana
  misc_feature (1)..(285): Ceres Seq. ID no. 13601088
MHSLDVVRTRFQVNDGRGSSLPTYKNTAHAVFTIARLEGLRGLYAGFFPAVIGSTVSWGLYFFFYGRAKQRYARGRDDEKLSPALHLASAAEAGALVCLCTNPIWLVKTRLQLQTPLHQTQPYSGLLDAFRTIVKEEGPRALYKGIVPGLVLVSHGAIQFTAYEELRKIIVDLKERRRKSESTDNLLNSADYAALGGSSKVAAVLLTYPFQVIRARLQQRPSTNGIPRYIDSLHVIRETARYEGLRGFYRGLTANLLKNVPASSITFIVYENVLKLLKQHPTTKD

SEQ ID NO: 32794 - DNA, 2350 bp, Arabidopsis thaliana
  misc_feature (1)..(2350): Ceres Seq. ID no. 13601100
gtcctcttttgtcgtctctccctgctttcgcacttcatagcctcaatctctcaacaagcagaagagattcgattctccattatcttccttctaaatgccttccctaatgttatctgataagaaagaggagaagaagatgaagaagaagatggctttggataccccagagcttgattctaagaaggggaagaaggagcagaagctgaaactatctgattcggatgaagaagagtcggagaagaagaagagtaagaagaaggataagaagcgtaaggcttccgaggaggaggatgaagtgaagagcgattcaagctcggagaagaagaagagcagcaagaaggttaagttgggcgttgaggatgttgaagttgataaccctaatgctgtttctaagtttcggatttctgcgcctttgagggagaagcttaaggcgaatggtattgaagctcttttcccgattcaggcttccacgtttgatatggttctcgatggtgctgatttagttggacgggctcgtactggtcagggtaaaacattggcttttgtgttgcctatattggaatctttggttaatggacctgccaaaagcaaaaggaagatgggatatggcaggtcaccaagtgttttggtccttttaccgaccagagaattggccaagcaggtggctgctgactttgatgcatatggaggatcacttgggttaagttcatgttgtctctatggaggtgatagctatccagttcaggagggtaaattaaagagaggtgttgacattgtagttggaacccctggtcgtattaaggatcatattgaaagacaaaaccttgatttcagctatttacaattccgtgttcttgatgaagctgatgaaatgttgaggatgggatttgttgaggatgttgaacttattttagggaaagtggaggattctactaaagtccagactcttctcttcagtgctactttgccatcatgggtgaaaaatatctctaacaggtttcttaaaagagaccagaagactattgatcttgttggtaatgataaaatgaaggccagtaatagtgttcgacacattgctattccttgtaataaggcagccatggctcggttgattcctgatattatcagttgctatagcagtggaggccaaactattattttcgctgaaactaaagttcaagtttctgagctttctggtttgttggatggatcaagagccttgcatggtgaaatacctcaatcacaacgtgaggttactcttgctggatttaggaatggcaagtttgcaacattggtggctacaaatgttgctgctcgtggtctagatatcaatgatgtgcagttaattatccagtgtgagcctccacgtgaagttgaagcatatattcatcgttcaggccgaacaggaagagctggcaacacaggagttgcggttacactctacgattctagaaagtcgagtgtatccaggatcgaaaaagaagctggtatcaaatttgagcaccttgctgcacctcaacctgatgaaattgccagatctggtggtatggaagctgctgagaaagttaaacaagtgtgtgacagtgtggttcctgcattccttgaagctgccaaggaattattagaaacttctggtttatcagctgaagtactcctcgcaaaagctcttgcaaaaactgcgggcttcactgagataaagaaaaggtcacttcttacatcaatggagaactatgtgacactacatcttgaagcagggaaaccaatatactcgccatcatttgtttatggactgctaaggagagttttaccggatgacaaggtggaaatgattgaagggttatctctaacagcagataaaacaggagctgtgttcgatgttaagcaatcagatctagacttgttcattgcaggagcacaaaagagtgctggaagtatgagtttggaagtggttaaggtgatgcctaaactccaggagagagaaccattgccacaaaaaagattcggtggtggtggcagaggaaatcggtttggtggtggtggaggaaatcggtttggcggtggtggtggcagaggaagaggaggcagtggtggtagaggccagagatattgaaaactggaacccaacttctcctttctatataaaaagaaactaaactccgtcttataatttcattactatcttcttccgctgatgttttctacactataataggtggcttttctgtgttttccattttctttccttgaacaaacttatggaggctctcttgtaccctcttatcaattttgtgtaatgttggatgataatgatgattaaattataacttcgtcactcattggaattgttttg

SEQ ID NO: 32795 - protein, 671 aa, Arabidopsis thaliana
  misc_feature (1)..(671): Ceres Seq. ID no. 13601101
MPSLMLSDKKEEKKMKKKMALDTPELDSKKGKKEQKLKLSDSDEEESEKKKSKKKDKKRKASEEEDEVKSDSSSEKKKSSKKVKLGVEDVEVDNPNAVSKFRISAPLREKLKANGIEALFPIQASTFDMVLDGADLVGRARTGQGKTLAFVLPILESLVNGPAKSKRKMGYGRSPSVLVLLPTRELAKQVAADFDAYGGSLGLSSCCLYGGDSYPVQEGKLKRGVDIVVGTPGRIKDHIERQNLDFSYLQFRVLDEADEMLRMGFVEDVELILGKVEDSTKVQTLLFSATLPSWVKNISNRFLKRDQKTIDLVGNDKMKASNSVRHIAIPCNKAAMARLIPDIISCYSSGGQTIIFAETKVQVSELSGLLDGSRALHGEIPQSQREVTLAGFRNGKFATLVATNVAARGLDINDVQLIIQCEPPREVEAYIHRSGRTGRAGNTGVAVTLYDSRKSSVSRIEKEAGIKFEHLAAPQPDEIARSGGMEAAEKVKQVCDSVVPAFLEAAKELLETSGLSAEVLLAKALAKTAGFTEIKKRSLLTSMENYVTLHLEAGKPIYSPSFVYGLLRRVLPDDKVEMIEGLSLTADKTGAVFDVKQSDLDLFIAGAQKSAGSMSLEVVKVMPKLQEREPLPQKRFGGGGRGNRFGGGGGNRFGGGGGRGRGGSGGRGQRY

SEQ ID NO: 32796 - protein, 667 aa, Arabidopsis thaliana
  misc_feature (1)..(667): Ceres Seq. ID no. 13601102
MLSDKKEEKKMKKKMALDTPELDSKKGKKEQKLKLSDSDEEESEKKKSKKKDKKRKASEEEDEVKSDSSSEKKKSSKKVKLGVEDVEVDNPNAVSKFRISAPLREKLKANGIEALFPIQASTFDMVLDGADLVGRARTGQGKTLAFVLPILESLVNGPAKSKRKMGYGRSPSVLVLLPTRELAKQVAADFDAYGGSLGLSSCCLYGGDSYPVQEGKLKRGVDIVVGTPGRIKDHIERQNLDFSYLQFRVLDEADEMLRMGFVEDVELILGKVEDSTKVQTLLFSATLPSWVKNISNRFLKRDQKTIDLVGNDKMKASNSVRHIAIPCNKAAMARLIPDIISCYSSGGQTIIFAETKVQVSELSGLLDGSRALHGEIPQSQREVTLAGFRNGKFATLVATNVAARGLDINDVQLIIQCEPPREVEAYIHRSGRTGRAGNTGVAVTLYDSRKSSVSRIEKEAGIKFEHLAAPQPDEIARSGGMEAAEKVKQVCDSVVPAFLEAAKELLETSGLSAEVLLAKALAKTAGFTEIKKRSLLTSMENYVTLHLEAGKPIYSPSFVYGLLRRVLPDDKVEMIEGLSLTADKTGAVFDVKQSDLDLFIAGAQKSAGSMSLEVVKVMPKLQEREPLPQKRFGGGGRGNRFGGGGGNRFGGGGGRGRGGSGGRGQRY

SEQ ID NO: 32797 - protein, 657 aa, Arabidopsis thaliana
  misc_feature (1)..(657): Ceres Seq. ID no. 13601103
MKKKMALDTPELDSKKGKKEQKLKLSDSDEEESEKKKSKKKDKKRKASEEEDEVKSDSSSEKKKSSKKVKLGVEDVEVDNPNAVSKFRISAPLREKLKANGIEALFPIQASTFDMVLDGADLVGRARTGQGKTLAFVLPILESLVNGPAKSKRKMGYGRSPSVLVLLPTRELAKQVAADFDAYGGSLGLSSCCLYGGDSYPVQEGKLKRGVDIVVGTPGRIKDHIERQNLDFSYLQFRVLDEADEMLRMGFVEDVELILGKVEDSTKVQTLLFSATLPSWVKNISNRFLKRDQKTIDLVGNDKMKASNSVRHIAIPCNKAAMARLIPDIISCYSSGGQTIIFAETKVQVSELSGLLDGSRALHGEIPQSQREVTLAGFRNGKFATLVATNVAARGLDINDVQLIIQCEPPREVEAYIHRSGRTGRAGNTGVAVTLYDSRKSSVSRIEKEAGIKFEHLAAPQPDEIARSGGMEAAEKVKQVCDSVVPAFLEAAKELLETSGLSAEVLLAKALAKTAGFTEIKKRSLLTSMENYVTLHLEAGKPIYSPSFVYGLLRRVLPDDKVEMIEGLSLTADKTGAVFDVKQSDLDLFIAGAQKSAGSMSLEVVKVMPKLQEREPLPQKRFGGGGRGNRFGGGGGNRFGGGGGRGRGGSGGRGQRY

SEQ ID NO: 32798 - DNA, 812 bp, Arabidopsis thaliana
  misc_feature (1)..(812): Ceres Seq. ID no. 13601104
aagaagacaacaatggagtgctctctctcatccatcctccttctccttgtactctgcttcactcatcccattccttctctaaccttcgagccactaatctcttctcttgatcttcatgaagaagaaagctgcccttacactgtaattgttaccacaagctgtttctctcctgattggtctagagatcaggtcactatcgctttgggtgacgccgacgataaccaggtggtcgcaccgagactagacaaaccgctaagtggaggaggtggttttgagaaatgttcatcggacacattccaagtcaaaggtaaatgtctcaacactatctgctccgtctacatctaccgttccggtaccgacggctggatcccggagaccgtcgagatatacaaggaaggttccaaatccgtgaaattcgatttcaacaagaacgtccctgaaaacatttggtacggaaacaactattgtaacaacaccgatttgccaccgccttccccggatttccctccgttttctccatccatcccaccgccttcaccaccttattttcctcctgaaccaccttcaatcccgccgccaccaccaccatcaccgccgtctgctgcctctggacgtggaagtggtcagagtttggttgttgcgtttgctgcgtttgtgtttgcgtttgcggctgtggttgtttgagttattttgttaagaattaagagttgtctcaataagtaacgagtatcgtgtaatccctctgttttgtctttgactctttgtagttgaacattgacaatttcatattgtggtaacattaattagttaac

SEQ ID NO: 32799 - protein, 227 aa, Arabidopsis thaliana
  misc_feature (1)..(227): Ceres Seq. ID no. 13601105
KKTTMECSLSSILLLLVLCFTHPIPSLTFEPLISSLDLHEEESCPYTVIVTTSCFSPDWSRDQVTIALGDADDNQVVAPRLDKPLSGGGGFEKCSSDTFQVKGKCLNTICSVYIYRSGTDGWIPETVEIYKEGSKSVKFDFNKNVPENIWYGNNYCNNTDLPPPSPDFPPFSPSIPPPSPPYFPPEPPSIPPPPPPSPPSAASGRGSGQSLVVAFAAFVFAFAAVVV

SEQ ID NO: 32800 - protein, 223 aa, Arabidopsis thaliana
  misc_feature (1)..(223): Ceres Seq. ID no. 13601106
MECSLSSILLLLVLCFTHPIPSLTFEPLISSLDLHEEESCPYTVIVTTSCFSPDWSRDQVTIALGDADDNQVVAPRLDKPLSGGGGFEKCSSDTFQVKGKCLNTICSVYIYRSGTDGWIPETVEIYKEGSKSVKFDFNKNVPENIWYGNNYCNNTDLPPPSPDFPPFSPSIPPPSPPYFPPEPPSIPPPPPPSPPSAASGRGSGQSLVVAFAAFVFAFAAVVV

SEQ ID NO: 32801 - DNA, 1317 bp, Arabidopsis thaliana
  misc_feature (1)..(1317): Ceres Seq. ID no. 13601118
aagtaacaaaatactaattcaaaagctttataaagtttcttttctcattcggttctaaagttcctatttttcaatggattacgtgagaacccaagtcgaagctgtttttgatgattctgagcaagatggatcaaccatctctgaatctggaagctgcgattcttcttctgatcgatcttttgctgacgagcttgggcttatggagttgcttgaaggagataaagctcatgatttgatctatcgtaattgtaaatctggtcttggtgatcaatgtcagattctctctgttcttagaaacggatttaggaacgttggatctcgtgcaaagctcaagacttttcaggtttttcaagaggcggtgcagatgaaacacggtggagacggtggagctaaggtgaaatacggttggtgctctgtttcgaaacatgagcttaaaacgatttttgagtatgggtttagcgagccgctgaggaatgatggatcttttggccgtggattgtatctctcgccggataattctcctcttgattgtttgaaggattcagcttcagaatcagaagatgggatgagattcttgttgctttgtagagttctacttggaaaatcagagattgttcctcaaggctcgactagatcatgtccaagttcaccagagtttgattctggtgtggatgatttagtttctacgaagaagtatattgtgtggagtacacacatgaacactcatgttttgcctgagtttcttgtttgcatcaaagctccatttaacctaactcgaagtccaaagagattgagatcaccatggatggcatttcctgtattgatcaaagcattgtccaagtttctacctccttctcaaatacttgtcattcagaaacattacaaagatcaacaaaataggagaattacacggagcgaactaatccaacgagtcagaagcataaccggagacaagttactagttcacatcatcaaagcttgtggacataaagtacaacactaaatctccattgcagatcactttggcgtttttgtttcaaggacacaatcaccatggttgtatttgtctgtttaccaactccaaaatgatcaggactggtagagtccctttctattgttttcccatgatagtgatgaaaaaaaactgttcattagattatttaagatcgattagattagggtcttagcaacattattaatgaagagaacattaacaagttatcatcttgtttttcttttcactcttcttctttcaaaaacatttgtattattgtctggctttgagctgaagaaaatttctggtggactgagttttac

SEQ ID NO: 32802 - protein, 309 aa, Arabidopsis thaliana
  misc_feature (1)..(309): Ceres Seq. ID no. 13601119
MDYVRTQVEAVFDDSEQDGSTISESGSCDSSSDRSFADELGLMELLEGDKAHDLIYRNCKSGLGDQCQILSVLRNGFRNVGSRAKLKTFQVFQEAVQMKHGGDGGAKVKYGWCSVSKHELKTIFEYGFSEPLRNDGSFGRGLYLSPDNSPLDCLKDSASESEDGMRFLLLCRVLLGKSEIVPQGSTRSCPSSPEFDSGVDDLVSTKKYIVWSTHMNTHVLPEFLVCIKAPFNLTRSPKRLRSPWMAFPVLIKALSKFLPPSQILVIQKHYKDQQNRRITRSELIQRVRSITGDKLLVHIIKACGHKVQH

SEQ ID NO: 32803 - protein, 267 aa, Arabidopsis thaliana
  misc_feature (1)..(267): Ceres Seq. ID no. 13601120
MELLEGDKAHDLIYRNCKSGLGDQCQILSVLRNGFRNVGSRAKLKTFQVFQEAVQMKHGGDGGAKVKYGWCSVSKHELKTIFEYGFSEPLRNDGSFGRGLYLSPDNSPLDCLKDSASESEDGMRFLLLCRVLLGKSEIVPQGSTRSCPSSPEFDSGVDDLVSTKKYIVWSTHMNTHVLPEFLVCIKAPFNLTRSPKRLRSPWMAFPVLIKALSKFLPPSQILVIQKHYKDQQNRRITRSELIQRVRSITGDKLLVHIIKACGHKVQH

SEQ ID NO: 32804 - protein, 212 aa, Arabidopsis thaliana
  misc_feature (1)..(212): Ceres Seq. ID no. 13601121
MKHGGDGGAKVKYGWCSVSKHELKTIFEYGFSEPLRNDGSFGRGLYLSPDNSPLDCLKDSASESEDGMRFLLLCRVLLGKSEIVPQGSTRSCPSSPEFDSGVDDLVSTKKYIVWSTHMNTHVLPEFLVCIKAPFNLTRSPKRLRSPWMAFPVLIKALSKFLPPSQILVIQKHYKDQQNRRITRSELIQRVRSITGDKLLVHIIKACGHKVQH

SEQ ID NO: 32805 - DNA, 1065 bp, Arabidopsis thaliana
  misc_feature (1)..(1065): Ceres Seq. ID no. 13601134
atgatttggcccagaagagactttaagtttcctaatacagttaacggtttactcagtgaaccggagggagacagcgagatgaggccggagatagttctgttcggcgactcgatcacggcgcagtcttttaggtccggcggttggggatctgctcttgccgacgcttactctcgcaaggctgatgttgtggttcgaggctacggcggctacaacacccgatgggctctcttcttgcttcatcacatcttccctctcggctcttcgtctcctcctgttgctacgacgatattcttcggtgcaaacgatgcagctctcaaaggaagaaccagtgatagacaacatgtgccggtggaagagtacacagataatgtcagaaagattgttcagcatttgaagaaatgttcacctacaatgctaattgtgcttataactccaccaccaattgatgaagctggacgtcaaagttatgcagaatcaatctacggtgagaaagctatgaaagagcctgagagaacaaacgaaacaacaggggtatatgcacaacattgtgttgcattggccgaggaactcggtctgcgatgtgtcaacttatggtctaagatgcaggaaaccaatgattggcagaaaaagtacctaagtgatgggctccatctcacgcctgaaggcaatggggtagtttttgatgaagtctcgagagtttttagagaagcttggctctctcccgaagaaatgccgtttgatttcccccatcattcgcatatcgatggtaaaaacccatcgaaagcttttgaagagcgttgcttataacgatcatccccaaattcatgagcaggtttgttttgatttaaattcatgaacacgtttcaatgttgtgatttagaaaactctcggatgtgaataaatacctaaaaagtgcatcatcactagagatcgttttcaagagaaatgaacttatgatgtacttactatatgttgtgacttttgacttatgtacctgcactagctttctatcttccttgctatatatttcagtctgaaagattttttttaatcttcttttcaatg

SEQ ID NO: 32806 - protein, 268 aa, Arabidopsis thaliana
  misc_feature (1)..(268): Ceres Seq. ID no. 13601135
MIWPRRDFKFPNTVNGLLSEPEGDSEMRPEIVLFGDSITAQSFRSGGWGSALADAYSRKADVVVRGYGGYNTRWALFLLHHIFPLGSSSPPVATTIFFGANDAALKGRTSDRQHVPVEEYTDNVRKIVQHLKKCSPTMLIVLITPPPIDEAGRQSYAESIYGEKAMKEPERTNETTGVYAQHCVALAEELGLRCVNLWSKMQETNDWQKKYLSDGLHLTPEGNGVVFDEVSRVFREAWLSPEEMPFDFPHHSHIDGKNPSKAFEERCL

SEQ ID NO: 32807 - protein, 242 aa, Arabidopsis thaliana
  misc_feature (1)..(242): Ceres Seq. ID no. 13601136
MRPEIVLFGDSITAQSFRSGGWGSALADAYSRKADVVVRGYGGYNTRWALFLLHHIFPLGSSSPPVATTIFFGANDAALKGRTSDRQHVPVEEYTDNVRKIVQHLKKCSPTMLIVLITPPPIDEAGRQSYAESIYGEKAMKEPERTNETTGVYAQHCVALAEELGLRCVNLWSKMQETNDWQKKYLSDGLHLTPEGNGVVFDEVSRVFREAWLSPEEMPFDFPHHSHIDGKNPSKAFEERCL

SEQ ID NO: 32808 - DNA, 1437 bp, Arabidopsis thaliana
  misc_feature (1)..(1437): Ceres Seq. ID no. 13601143
atcaaattaaaaccctccagcctccaacaacaaaatttaccaacactctctctttctctttctctctgaaaacttaaaacgatggctataaccgccactcaaaacgacggcgtttcactaaacgccaataagatttcgtatgatcttgtggaaactgatgttgagatcatcacctccggtcgtcgtagtattccggcacactccggcatcctcgcttcggtctcaccggtactgacgaacatcatcgagaagccgaggaagattcacggcggatcatcgaagaaagttattaagattctcggtgttccatgcgacgccgtttcagtcttcgtcagattcctctattctccgagtgtcacggagaatgagatggaaaaatacggaatccatctactggctttatcacacgtgtatatggtgactcagttaaagcaacggtgcactaaaggcgtcggtgagagagtaaccgccgaaaacgttgtcgatattctccagctggctcgtctctgcgacgcacctgacctctgtctcaagtgtatgcgattcattcactacaagttcaagaccgttgaacagacagaaggatggaagtttcttcaagaacacgatccttttcttgaacttgacattctccaattcatcgacgatgcagaatcgaggaagaaaagaagaaggagacacagacgagaacagaatctgtatttgcagctgagtgaagccatggaatgtatagaacacatatgcaccgaaggttgcacactggtcggaccatcgtctaacttagacaacaagtcaacatgtcaagcaaaacccggtccatgcagtgcgttttcgacttgttacggacttcaacttcttatacgtcactttgcagtatgcaagaaaagagtcgatggcaaaggttgtgtccgatgcaagagaatgattcaactccttagactccattcttcgatttgtgaccaatctgaatcttgccgtgtccctctttgcaggcaatataagaatagaggtgaaaaggacaagaaaatggttgaggacacgaagtggaaggttctggtgagaagagtagcgtctgctaaagccatgtcttcgttgtctcaatcaaagaagaaaaaaagtgaagtgttatttaaagaagaagcagaagatttgatcagaatccggaacaagttaatgtgaatatacaatatatgtgtttttattagattatatagtgagcgattgttagaagccattaattacttgagtcggaaggtttatttgtttgttatttgtctctcggactggttgattgggttaaacttgtcaatgagtaaccctttgaatctgtcgttttgtttggtcggtcgaattatatagaaatgtattattggttataaaatggtattagggtttttggagactttgtggcaaaaagtatacagattgatccggttt

SEQ ID NO: 32809 - protein, 365 aa, Arabidopsis thaliana
  misc_feature (1)..(365): Ceres Seq. ID no. 13601144
MAITATQNDGVSLNANKISYDLVETDVEIITSGRRSIPAHSGILASVSPVLTNIIEKPRKIHGGSSKKVIKILGVPCDAVSVFVRFLYSPSVTENEMEKYGIHLLALSHVYMVTQLKQRCTKGVGERVTAENVVDILQLARLCDAPDLCLKCMRFIHYKFKTVEQTEGWKFLQEHDPFLELDILQFIDDAESRKKRRRRHRREQNLYLQLSEAMECIEHICTEGCTLVGPSSNLDNKSTCQAKPGPCSAFSTCYGLQLLIRHFAVCKKRVDGKGCVRCKRMIQLLRLHSSICDQSESCRVPLCRQYKNRGEKDKKMVEDTKWKVLVRRVASAKAMSSLSQSKKKKSEVLFKEEAEDLIRIRNKLM

SEQ ID NO: 32810 - protein, 269 aa, Arabidopsis thaliana
  misc_feature (1)..(269): Ceres Seq. ID no. 13601145
MEKYGIHLLALSHVYMVTQLKQRCTKGVGERVTAENVVDILQLARLCDAPDLCLKCMRFIHYKFKTVEQTEGWKFLQEHDPFLELDILQFIDDAESRKKRRRRHRREQNLYLQLSEAMECIEHICTEGCTLVGPSSNLDNKSTCQAKPGPCSAFSTCYGLQLLIRHFAVCKKRVDGKGCVRCKRMIQLLRLHSSICDQSESCRVPLCRQYKNRGEKDKKMVEDTKWKVLVRRVASAKAMSSLSQSKKKKSEVLFKEEAEDLIRIRNKLM

SEQ ID NO: 32811 - protein, 254 aa, Arabidopsis thaliana
  misc_feature (1)..(254): Ceres Seq. ID no. 13601146
MVTQLKQRCTKGVGERVTAENVVDILQLARLCDAPDLCLKCMRFIHYKFKTVEQTEGWKFLQEHDPFLELDILQFIDDAESRKKRRRRHRREQNLYLQLSEAMECIEHICTEGCTLVGPSSNLDNKSTCQAKPGPCSAFSTCYGLQLLIRHFAVCKKRVDGKGCVRCKRMIQLLRLHSSICDQSESCRVPLCRQYKNRGEKDKKMVEDTKWKVLVRRVASAKAMSSLSQSKKKKSEVLFKEEAEDLIRIRNKLM

SEQ ID NO: 32812 - DNA, 1623 bp, Arabidopsis thaliana
  misc_feature (1)..(1623): Ceres Seq. ID no. 13601163
acaaatcaaaacaacataattaacttacccaaacaagaaacccaagaatccaaaatggaaatgctcaacgcaataattctcatcctatttccaatcatagggtttgtattaatcttctcattcccaacaaaaaccctaaaagccaaaaccgcatcaccctctaatccgacatcgtaccaactcatcggctctattctctccttcaacaaaaaccgccaccgtcttctccaatggtacacagatctcctccgtctctctccgtctcaaaccatcaccgtcgatctcctcttcggtcgtcggactatcatcactgcaaaccctgaaaacgttgagcacattctcaaaacaaatttttataacttccctaaaggcaaacctttcaccgacctcctaggagatctactcggcggcggaatctttaattctgacggcgagttatggagctcacagcgtaaactcgcgagccacgagtttacaatgcgttctcttagggaattcactttcgaaatcctccgtgaagaagtccaaaaccgcctcattccggtgctttcctccgccgtggactgtggagagacggttgattttcaggaggttttgaagcgctttgctttcgatgttgtatgcaaagtgtcgttgggttgggatccggattgtttggatttgacccgacccgttccagaacttgttaaggcttttgatgtagcggcggagatcagcgctcgccgcgccacggagccggtttacgccgtgtggaaagtaaagcgtttcttgaacgtagggagcgagaagaggttgagagaagccatcaagaccgtacacttgtctgtgtctgagatcatccgggccaaaaagaaaagcctcgatatcggtggtgacgtgtcggacaagcaggacctgctgtcgaggtttctcgccgctggccacggggaagaagccgtgagggatagtgtaatcagctttattatggcgggaagggatacaacgtcggcagcgatgacgtggctgttttggttgttgagtcaaaatgatgacgtggagacgaagatactcgacgaattgagaaacaaagggtctttagggttagggtttgaggatttgagagagatgagttacacaaaagcttgtctgtgtgaagcaatgaggctttacccaccagtggcttgggactcaaagcatgcagcaaacgacgacattttgccagatggaacacctctcaaaaagggagacaaagtcacttatttcccttacggtatgggaaggatggagaaggtgtggggtaaagattgggacgagtttaaaccaaaccggtggtttgaggaagaaccgagttacggtacaaaaccggttttgaaaagtgtgagttcgttcaagtttccggttttccaagccggaccaagggtttgcataggtaaagaaatggcttttacacaaatgaaatacgtggttggttcagttttgagtcggtttaagattataccggtttgcaataaccggccggtctttgttcctcttctaaccgctcacatggctggtgggctaaaggtgaagatcaagaggagagagcaatgtgattcgatgtatatttaattaattgattaatcaagtcatgtccttgtagaatat

SEQ ID NO: 32813 - protein, 528 aa, Arabidopsis thaliana
  misc_feature (1)..(528): Ceres Seq. ID no. 13601164
TNQNNIINLPKQETQESKMEMLNAIILILFPIIGFVLIFSFPTKTLKAKTASPSNPTSYQLIGSILSFNKNRHRLLQWYTDLLRLSPSQTITVDLLFGRRTIITANPENVEHILKTNFYNFPKGKPFTDLLGDLLGGGIFNSDGELWSSQRKLASHEFTMRSLREFTFEILREEVQNRLIPVLSSAVDCGETVDFQEVLKRFAFDVVCKVSLGWDPDCLDLTRPVPELVKAFDVAAEISARRATEPVYAVWKVKRFLNVGSEKRLREAIKTVHLSVSEIIRAKKKSLDIGGDVSDKQDLLSRFLAAGHGEEAVRDSVISFIMAGRDTTSAAMTWLFWLLSQNDDVETKILDELRNKGSLGLGFEDLREMSYTKACLCEAMRLYPPVAWDSKHAANDDILPDGTPLKKGDKVTYFPYGMGRMEKVWGKDWDEFKPNRWFEEEPSYGTKPVLKSVSSFKFPVFQAGPRVCIGKEMAFTQMKYVVGSVLSRFKIIPVCNNRPVFVPLLTAHMAGGLKVKIKRREQCDSMYI

SEQ ID NO: 32814 - protein, 510 aa, Arabidopsis thaliana
  misc_feature (1)..(510): Ceres Seq. ID no. 13601165
MEMLNAIILILFPIIGFVLIFSFPTKTLKAKTASPSNPTSYQLIGSILSFNKNRHRLLQWYTDLLRLSPSQTITVDLLFGRRTIITANPENVEHILKTNFYNFPKGKPFTDLLGDLLGGGIFNSDGELWSSQRKLASHEFTMRSLREFTFEILREEVQNRLIPVLSSAVDCGETVDFQEVLKRFAFDVVCKVSLGWDPDCLDLTRPVPELVKAFDVAAEISARRATEPVYAVWKVKRFLNVGSEKRLREAIKTVHLSVSEIIRAKKKSLDIGGDVSDKQDLLSRFLAAGHGEEAVRDSVISFIMAGRDTTSAAMTWLFWLLSQNDDVETKILDELRNKGSLGLGFEDLREMSYTKACLCEAMRLYPPVAWDSKHAANDDILPDGTPLKKGDKVTYFPYGMGRMEKVWGKDWDEFKPNRWFEEEPSYGTKPVLKSVSSFKFPVFQAGPRVCIGKEMAFTQMKYVVGSVLSRFKIIPVCNNRPVFVPLLTAHMAGGLKVKIKRREQCDSMYI

SEQ ID NO: 32815 - protein, 508 aa, Arabidopsis thaliana
  misc_feature (1)..(508): Ceres Seq. ID no. 13601166
MLNAIILILFPIIGFVLIFSFPTKTLKAKTASPSNPTSYQLIGSILSFNKNRHRLLQWYTDLLRLSPSQTITVDLLFGRRTIITANPENVEHILKTNFYNFPKGKPFTDLLGDLLGGGIFNSDGELWSSQRKLASHEFTMRSLREFTFEILREEVQNRLIPVLSSAVDCGETVDFQEVLKRFAFDVVCKVSLGWDPDCLDLTRPVPELVKAFDVAAEISARRATEPVYAVWKVKRFLNVGSEKRLREAIKTVHLSVSEIIRAKKKSLDIGGDVSDKQDLLSRFLAAGHGEEAVRDSVISFIMAGRDTTSAAMTWLFWLLSQNDDVETKILDELRNKGSLGLGFEDLREMSYTKACLCEAMRLYPPVAWDSKHAANDDILPDGTPLKKGDKVTYFPYGMGRMEKVWGKDWDEFKPNRWFEEEPSYGTKPVLKSVSSFKFPVFQAGPRVCIGKEMAFTQMKYVVGSVLSRFKIIPVCNNRPVFVPLLTAHMAGGLKVKIKRREQCDSMYI

SEQ ID NO: 32816 - DNA, 1041 bp, Arabidopsis thaliana
  misc_feature (1)..(1041): Ceres Seq. ID no. 13601171
actctctctcttttcctctttgcaaatccttgaagaaatccaaaatccatagcaatggcgacttcgatagctcgattgtctcggagaggagtcacttctaacctgatccgtcgttgcttcgctgcggaagcggcgttggcgaggaagacagagttacctaaaccgcaattcacggtgtcgccgtcgacggatcgtgtgaaatgggactacagaggccaacgacagatcattcctttgggacagtggcttccgaaggtagccgttgatgcttacgtggcacccaacgttgtgctggctggtcaggtcacagtctgggacggctcgtctgtttggaacggtgccgttttgcgcggcgatctcaacaaaatcactgttggattctgctcgaatgtacaggaacggtgtgttgttcatgccgcctggtcttccccaacaggattaccagcagcgacaataatcgacaggtatgtgacagtaggtgcctacagtcttctgagatcatgtaccatcgaaccagagtgcatcatcggtcaacactcaatactaatggaaggctcactggttgagacccggtcaatcttggaagcgggttcagttgtgccgccaggaagaaggatcccatcaggtgaactatggggaggcaatccagcaagattcattagaaccctaaccaacgaagaaaccctagagatcccaaaactcgctgtagccatcaaccacttaagcggagattacttctctgagttcctaccttactcaactgtctacttagaggtagagaagttcaagaagtcccttgggatcgccgtttagaagcttcatctttttcgtgattcactttcatgtgtttatctatcatatgaggtctttctctctgcatattgcaataagtagctgatgaacatcaaaacaagtccggctctcttttttggttctaaaacgtttgtcatttcgttttttgggttctttgtaaaattccatttaaaactgattttggctgaatattgtctgaatgataatggcgacgacttctggttttgt

SEQ ID NO: 32817 - protein, 252 aa, Arabidopsis thaliana
  misc_feature (1)..(252): Ceres Seq. ID no. 13601172
MATSIARLSRRGVTSNLIRRCFAAEAALARKTELPKPQFTVSPSTDRVKWDYRGQRQIIPLGQWLPKVAVDAYVAPNVVLAGQVTVWDGSSVWNGAVLRGDLNKITVGFCSNVQERCVVHAAWSSPTGLPAATIIDRYVTVGAYSLLRSCTIEPECIIGQHSILMEGSLVETRSILEAGSVVPPGRRIPSGELWGGNPARFIRTLTNEETLEIPKLAVAINHLSGDYFSEFLPYSTVYLEVEKFKKSLGIAV

SEQ ID NO: 32818 - DNA, 1422 bp, Arabidopsis thaliana
  misc_feature (1)..(1422): Ceres Seq. ID no. 13601197
atttagaacctttagtaccttaccatgtgagtgaagagttcaaaaacctctgcaaaaactttcttttttatctctctctcttctttaaacttactttcaaacactaaatagccaaaacttaagataccaaatttcaacaggggaaaaaatgtataagaatcagcttcaagagcttgcacagagaagttgtttcaacttaccatcatatacttgcataagagaaggaccagatcatgctccaagattcaaagcttctgttaacttcaatggtgagatatttgagagtcccacttactgttctactctcagacaagctgagcatgcagctgctgaagtttcccttaatgtcctttcgtctagagtcccttcaaagtctctaactgctaagattcttgatgagacagggatttacaagaacctgcttcaagagacagcacatagagctggtcttgatctaccaatgtacacaagtgtgagatcaggatcttgtcacttcccaggtttctcttgtactgttgaacttgctgggatgacgtttacaggagaatcagcaaagacaaagaaacaagctgagaaaaacgcagccattgcagcttggtcctctttgaagaaaatgtcaagcttggattcacaagatgaagagaaggaacaagaagcagtagcaagagtactctcaagatttaaacccaaagaagtaagaagacgagagacaacaaaccaatggagaagaagaacaagtcaacaagattcaaacaaggatttgttgattgagagattgagatggatcaatcttttgaccaatcaagcttcttcatcatcatcaacatcaacaccgaatcaacacaaaaactccagtttcatctctctaattcccccaccaccaccacctaaatcctccaaaattttgccatttatccagcaatacaaagacagatcatcacaagaagctaagacagagacagcgacagagatgatcaacagcaaagccaaagtcaatgaaacatcaaccagattgagtaagcaaatgcccttttccgacatgaacagatacaactttgtcggagggtgtagcgtaaacccttatagtctggctccagcggttcaaatgagatcagtgattccagttttcgcagctccaccaccgaaaccaaaccccaaccttaacccatcatcattatcatcatcagtcaatgaattcacctcatccaataattcctgctctgttctgaatacgccgggattgggaggccaagagaagaagaatctaactcgcgaaatgatcaaacttggttcagaatcgagaattttggatcaaacccatgatagttagctaaatttggttaatgggttaatctcaaattaaatccttgtcaagtgtttgtcacatagataaattatagaccagtatgtttccgtttcttg

SEQ ID NO: 32819 - protein, 393 aa, Arabidopsis thaliana
  misc_feature (1)..(393): Ceres Seq. ID no. 13601198
MYKNQLQELAQRSCFNLPSYTCIREGPDHAPRFKASVNFNGEIFESPTYCSTLRQAEHAAAEVSLNVLSSRVPSKSLTAKILDETGIYKNLLQETAHRAGLDLPMYTSVRSGSCHFPGFSCTVELAGMTFTGESAKTKKQAEKNAAIAAWSSLKKMSSLDSQDEEKEQEAVARVLSRFKPKEVRRRETTNQWRRRTSQQDSNKDLLIERLRWINLLTNQASSSSSTSTPNQHKNSSFISLIPPPPPPKSSKILPFIQQYKDRSSQEAKTETATEMINSKAKVNETSTRLSKQMPFSDMNRYNFVGGCSVNPYSLAPAVQMRSVIPVFAAPPPKPNPNLNPSSLSSSVNEFTSSNNSCSVLNTPGLGGQEKKNLTREMIKLGSESRILDQTHDS

SEQ ID NO: 32820 - protein, 289 aa, Arabidopsis thaliana
  misc_feature (1)..(289): Ceres Seq. ID no. 13601199
MYTSVRSGSCHFPGFSCTVELAGMTFTGESAKTKKQAEKNAAIAAWSSLKKMSSLDSQDEEKEQEAVARVLSRFKPKEVRRRETTNQWRRRTSQQDSNKDLLIERLRWINLLTNQASSSSSTSTPNQHKNSSFISLIPPPPPPKSSKILPFIQQYKDRSSQEAKTETATEMINSKAKVNETSTRLSKQMPFSDMNRYNFVGGCSVNPYSLAPAVQMRSVIPVFAAPPPKPNPNLNPSSLSSSVNEFTSSNNSCSVLNTPGLGGQEKKNLTREMIKLGSESRILDQTHDS

SEQ ID NO: 32821 - protein, 266 aa, Arabidopsis thaliana
  misc_feature (1)..(266): Ceres Seq. ID no. 13601200
MTFTGESAKTKKQAEKNAAIAAWSSLKKMSSLDSQDEEKEQEAVARVLSRFKPKEVRRRETTNQWRRRTSQQDSNKDLLIERLRWINLLTNQASSSSSTSTPNQHKNSSFISLIPPPPPPKSSKILPFIQQYKDRSSQEAKTETATEMINSKAKVNETSTRLSKQMPFSDMNRYNFVGGCSVNPYSLAPAVQMRSVIPVFAAPPPKPNPNLNPSSLSSSVNEFTSSNNSCSVLNTPGLGGQEKKNLTREMIKLGSESRILDQTHDS

SEQ ID NO: 32822 - DNA, 3631 bp, Arabidopsis thaliana
  misc_feature (1)..(3631): Ceres Seq. ID no. 13601204
atggtttcaaagagaaagtcaagaacttcaaagactatagaagattcttgtatccatctatgttctgtcttcttcagattcttgtactatactcttcctgcattatttctcttcttctttcttctttatctttgtttatctttcaccaccggaatctcctacaacaacttccatatgtgtatcttctctcgaaagttcaacgacccttattgtaacacggctggttctaaacccggtttccaaataatttctgaagaaaatgtaactttcgccggagagatcgcaggagatagagtttctaaggatcacaacaagattcttaattcagttcctgttcaagaacacaaaacaaagaacaaggttgatctcaattcactcattgaactaaaagccgaggaagaatacagcaaatacatcaaacctacgagtgaagatgagggatatgcgttaagggcagccatcaagtatctttacctacaaagatcatggctatctccgggagatgaaaacctcaataaaccgcgatcgtgtgaaggtaaaggagtttacgtttatgatttaccgtcaaaattcaacagcgatttgttggtaggatgcaacgatatacttccaggggttaacttgtgtagctacttcaagaatgaaggctttggagaagctattaagaatcttggcaaaggttggtttgctacacacatgtattctcttgagcccatcttacactctagggttttgaagcatccttgtagggtttacaacgagacccaagctaagctcttctttgtcccttactatggcgggtatgatgttttgagatggcactataggaatgtttctgaagatgtgaaggaccgtttggggatcgaggttttaaaatggcttaattcaaaggaatcatggaggagaaacgccgggaaagatcatgtgttcgttctaggaaaaataacttgggattttaggagagataaggacccttggggctcaaggttccttgagctacaagaaatgcaaaaccctaccaagctactcatagaaagacagccatggcaggtcaacgacatcgccattcctcacccaacttatttccatccgcgaacagatgatgatatcacccgctggcagatcaagatcatgagtaaacttcgccggaatctagtaagcttcgcgggaggtgcaagacccgataaccctaataacatccgatcaacgctaatcgagcaatgcatatcttccaaccaatgtcggttcttaaattgtacaaacgaaagctgcacgaatcccaagaatgtccttgatttgtttcaagattcagagttttgtctgcagccgcctggagatagtgcaacaaggagatcagtatttgattcactaatctccggctgcattccggtgatctttactccgtacacagcttattaccagtacgcgtggcatcttcctgaggatcatcggaagtactcagtgtatataagcgaacaagatgtgaaggaaaagagagtaaatgtggtggagatattgaaggcaaagactctaaaggagaaaaaggatatgaaaagttacatagttcaacagcttttgcctggattggtatatggagactccaatgctaagtttgaaaagtttcgagatgcttttgatattacttttgattgtttacttaagaaaatcaacagtgttctgaaaactttttccgatacacaaaatcggaggaagaagaagatgaagctcaaagtgtatgcggataggatgtcacagccatctcgtgctgtcctcatattctgcaaggttaacgaaatccaattcgacgagattttgatttccttggggaaacgtcaacagttatcccctgaattcaaagaaattaacccaatggggaaagttccagctattgttgatggcagacttaagctatttgagagtcacgctatattgatatatctttcctcagcatacgcaagtgtagttgatcattggtacccgaatgatctttccaaaagagccaagattcactccgttttggattggcatcacaccaatttacgccctggtgcatctggatatgttctgaatagcgttctagctccagctcttggtcttccactgaatccgaaagcagctgctgaagctgagaacatactaacaaactctctgtccactctagagactttttggcttaagggcagtgccaagtttttactcgggggcaagcaaccatctatagctgatctcagccttgtatgtgaacttatgcagctgcaggttttggatgacaaagatcgtcttagattgcttagccctcataagaaagttgaacaatggattgagagtacgagaaaagcgacaatgcctcactctgatgaggtccatgaggtccttttcagagccaaagatagatttcagaagcagcgagagatggcaaccgcatctaaaccgggtcctcaatctaagattatccaatttagtagtattggtgggacgagtgatggtccaaacctcgttcaagacacaaccgatcgtaaagctcgaagacgcaaatggagtccacctgacgatgtcattctcattagtgcttggttaaatactagtaaggatcgtaaagttgtcgtttatgatgaacaacaagcacatactttttggaagagaattggtgcacatgtttcaaatagcgcttcacttgcaaatctaccaaagcgagagtggaatcactgcaggcaaagatggaggaaaattaacgactacgtctgcaaatttgttggatgttatgatcaagctttgaatcaaagagctagtggtcaatctgaagatgatgttttccaagttgcataccaattgtactacaacaattacatgagtaatttcaaacttgagcatgcatggcgggagctccgacacaataaaaaatggtgtagtacatacacctctgaaaattctaaggggggtggaagctcaaagagaacaaagttgaatggaggtggtgtatattcttcaagctgtaatccggagagtgtgcctatagctctagatggagaggagcaagttatggatcgccctcttggtgtgaagtcgtcaaagcaaaaagagaagaaagttgctactaaaacaatgcttgaagaaagggaggccgattctagatcaagacttgagaacttgtgggtactagatgaagaggagcaagttatggatcttcctcttggtgtgaagtcatcgaagcagaaagagaggaaagttgctactaaaacaatgattgaagaaagggaggcagccaattttcgatcaagacttgggaacttgtggctactaaaggagaaagaagaaagggaggcagattcccgatcaagacttgagaacttgtgggcactgaaggagaaagacatagaagagcaaaagaaactaacaaggatggaagtccttaaaagtcttcttggaagaagaacaggtgaaacttctgaaaaggaagaaactttgaagaacaagctcattgatgagatgctctaatctctatgttctcgttgtatttatctctttattttctctatgtttatctcactatcaacttagtgacaggctatagacggcttttctagaaatagatactaactgaatcttccttaactatgttcaacgtttgttt

SEQ ID NO: 32823 - protein, 1164 aa, Arabidopsis thaliana
  misc_feature (1)..(1164): Ceres Seq. ID no. 13601205
MVSKRKSRTSKTIEDSCIHLCSVFFRFLYYTLPALFLFFFLLYLCLSFTTGISYNNFHMCIFSRKFNDPYCNTAGSKPGFQIISEENVTFAGEIAGDRVSKDHNKILNSVPVQEHKTKNKVDLNSLIELKAEEEYSKYIKPTSEDEGYALRAAIKYLYLQRSWLSPGDENLNKPRSCEGKGVYVYDLPSKFNSDLLVGCNDILPGVNLCSYFKNEGFGEAIKNLGKGWFATHMYSLEPILHSRVLKHPCRVYNETQAKLFFVPYYGGYDVLRWHYRNVSEDVKDRLGIEVLKWLNSKESWRRNAGKDHVFVLGKITWDFRRDKDPWGSRFLELQEMQNPTKLLIERQPWQVNDIAIPHPTYFHPRTDDDITRWQIKIMSKLRRNLVSFAGGARPDNPNNIRSTLIEQCISSNQCRFLNCTNESCTNPKNVLDLFQDSEFCLQPPGDSATRRSVFDSLISGCIPVIFTPYTAYYQYAWHLPEDHRKYSVYISEQDVKEKRVNVVEILKAKTLKEKKDMKSYIVQQLLPGLVYGDSNAKFEKFRDAFDITFDCLLKKINSVLKTFSDTQNRRKKKMKLKVYADRMSQPSRAVLIFCKVNEIQFDEILISLGKRQQLSPEFKEINPMGKVPAIVDGRLKLFESHAILIYLSSAYASVVDHWYPNDLSKRAKIHSVLDWHHTNLRPGASGYVLNSVLAPALGLPLNPKAAAEAENILTNSLSTLETFWLKGSAKFLLGGKQPSIADLSLVCELMQLQVLDDKDRLRLLSPHKKVEQWIESTRKATMPHSDEVHEVLFRAKDRFQKQREMATASKPGPQSKIIQFSSIGGTSDGPNLVQDTTDRKARRRKWSPPDDVILISAWLNTSKDRKVVVYDEQQAHTFWKRIGAHVSNSASLANLPKREWNHCRQRWRKINDYVCKFVGCYDQALNQRASGQSEDDVFQVAYQLYYNNYMSNFKLEHAWRELRHNKKWCSTYTSENSKGGGSSKRTKLNGGGVYSSSCNPESVPIALDGEEQVMDRPLGVKSSKQKEKKVATKTMLEEREADSRSRLENLWVLDEEEQVMDLPLGVKSSKQKERKVATKTMIEEREAANFRSRLGNLWLLKEKEEREADSRSRLENLWALKEKDIEEQKKLTRMEVLKSLLGRRTGETSEKEETLKNKLIDEML

SEQ ID NO: 32824 - protein, 1106 aa, Arabidopsis thaliana
  misc_feature (1)..(1106): Ceres Seq. ID no. 13601206
MCIFSRKFNDPYCNTAGSKPGFQIISEENVTFAGEIAGDRVSKDHNKILNSVPVQEHKTKNKVDLNSLIELKAEEEYSKYIKPTSEDEGYALRAAIKYLYLQRSWLSPGDENLNKPRSCEGKGVYVYDLPSKFNSDLLVGCNDILPGVNLCSYFKNEGFGEAIKNLGKGWFATHMYSLEPILHSRVLKHPCRVYNETQAKLFFVPYYGGYDVLRWHYRNVSEDVKDRLGIEVLKWLNSKESWRRNAGKDHVFVLGKITWDFRRDKDPWGSRFLELQEMQNPTKLLIERQPWQVNDIAIPHPTYFHPRTDDDITRWQIKIMSKLRRNLVSFAGGARPDNPNNIRSTLIEQCISSNQCRFLNCTNESCTNPKNVLDLFQDSEFCLQPPGDSATRRSVFDSLISGCIPVIFTPYTAYYQYAWHLPEDHRKYSVYISEQDVKEKRVNVVEILKAKTLKEKKDMKSYIVQQLLPGLVYGDSNAKFEKFRDAFDITFDCLLKKINSVLKTFSDTQNRRKKKMKLKVYADRMSQPSRAVLIFCKVNEIQFDEILISLGKRQQLSPEFKEINPMGKVPAIVDGRLKLFESHAILIYLSSAYASVVDHWYPNDLSKRAKIHSVLDWHHTNLRPGASGYVLNSVLAPALGLPLNPKAAAEAENILTNSLSTLETFWLKGSAKFLLGGKQPSIADLSLVCELMQLQVLDDKDRLRLLSPHKKVEQWIESTRKATMPHSDEVHEVLFRAKDRFQKQREMATASKPGPQSKIIQFSSIGGTSDGPNLVQDTTDRKARRRKWSPPDDVILISAWLNTSKDRKVVVYDEQQAHTFWKRIGAHVSNSASLANLPKREWNHCRQRWRKINDYVCKFVGCYDQALNQRASGQSEDDVFQVAYQLYYNNYMSNFKLEHAWRELRHNKKWCSTYTSENSKGGGSSKRTKLNGGGVYSSSCNPESVPIALDGEEQVMDRPLGVKSSKQKEKKVATKTMLEEREADSRSRLENLWVLDEEEQVMDLPLGVKSSKQKERKVATKTMIEEREAANFRSRLGNLWLLKEKEEREADSRSRLENLWALKEKDIEEQKKLTRMEVLKSLLGRRTGETSEKEETLKNKLIDEML

SEQ ID NO: 32825 - protein, 932 aa, Arabidopsis thaliana
  misc_feature (1)..(932): Ceres Seq. ID no. 13601207
MYSLEPILHSRVLKHPCRVYNETQAKLFFVPYYGGYDVLRWHYRNVSEDVKDRLGIEVLKWLNSKESWRRNAGKDHVFVLGKITWDFRRDKDPWGSRFLELQEMQNPTKLLIERQPWQVNDIAIPHPTYFHPRTDDDITRWQIKIMSKLRRNLVSFAGGARPDNPNNIRSTLIEQCISSNQCRFLNCTNESCTNPKNVLDLFQDSEFCLQPPGDSATRRSVFDSLISGCIPVIFTPYTAYYQYAWHLPEDHRKYSVYISEQDVKEKRVNVVEILKAKTLKEKKDMKSYIVQQLLPGLVYGDSNAKFEKFRDAFDITFDCLLKKINSVLKTFSDTQNRRKKKMKLKVYADRMSQPSRAVLIFCKVNEIQFDEILISLGKRQQLSPEFKEINPMGKVPAIVDGRLKLFESHAILIYLSSAYASVVDHWYPNDLSKRAKIHSVLDWHHTNLRPGASGYVLNSVLAPALGLPLNPKAAAEAENILTNSLSTLETFWLKGSAKFLLGGKQPSIADLSLVCELMQLQVLDDKDRLRLLSPHKKVEQWIESTRKATMPHSDEVHEVLFRAKDRFQKQREMATASKPGPQSKIIQFSSIGGTSDGPNLVQDTTDRKARRRKWSPPDDVILISAWLNTSKDRKVVVYDEQQAHTFWKRIGAHVSNSASLANLPKREWNHCRQRWRKINDYVCKFVGCYDQALNQRASGQSEDDVFQVAYQLYYNNYMSNFKLEHAWRELRHNKKWCSTYTSENSKGGGSSKRTKLNGGGVYSSSCNPESVPIALDGEEQVMDRPLGVKSSKQKEKKVATKTMLEEREADSRSRLENLWVLDEEEQVMDLPLGVKSSKQKERKVATKTMIEEREAANFRSRLGNLWLLKEKEEREADSRSRLENLWALKEKDIEEQKKLTRMEVLKSLLGRRTGETSEKEETLKNKLIDEML

SEQ ID NO: 32826 - DNA, 797 bp, Arabidopsis thaliana
  misc_feature (1)..(797): Ceres Seq. ID no. 13601208
gttcccaactccttacgcgctctctctctatctctttagctttctctttctagcggcgaagccatgggttatccggtggggtacactgagctcctcctcccaagaatcttccttcacttactctctctcttaggcttaatacgaacactcatagacacgggttttcggatattgggtctacccgactttctcgaatccgacccggtttcatcgtcatcgtcatggctggaaccaccgtatatgtccacggcggcgcatcatcaccaagaaagctcatttttcttcccagtggcggcgaggctagctggagaaatcttgcccgtcatcagattctcggagctaactcgacccggattcggatccggatccgattgctgcgcggtgtgcctccacgagttcgagaacgatgacgagatccgacggctgacgaattgtcaacacatatttcaccggagctgtttagaccgttggatgatgggttataatcagatgacgtgtccactttgtagaacgccgtttatttctgatgagttacaagttgcttttaaccaacgagtttggtctgaatctgaacttctcgcagaatcaaattagaatctttcttgtttgggtggaattagtttctactaatgagaaaattaatttctatcttttttttttttttttgtttaatctttagctgagtggttgatatatgtaaatataaaattataggtggtgatgcttagtaaattagaagaatgaaatttgtattatccgttgaggaaaaaaaagaaatgaatggaaatcttaatttt

SEQ ID NO: 32827 - protein, 176 aa, Arabidopsis thaliana
  misc_feature (1)..(176): Ceres Seq. ID no. 13601209
MGYPVGYTELLLPRIFLHLLSLLGLIRTLIDTGFRILGLPDFLESDPVSSSSSWLEPPYMSTAAHHHQESSFFFPVAARLAGEILPVIRFSELTRPGFGSGSDCCAVCLHEFENDDEIRRLTNCQHIFHRSCLDRWMMGYNQMTCPLCRTPFISDELQVAFNQRVWSESELLAESN

SEQ ID NO: 32828 - protein, 117 aa, Arabidopsis thaliana
  misc_feature (1)..(117): Ceres Seq. ID no. 13601210
MSTAAHHHQESSFFFPVAARLAGEILPVIRFSELTRPGFGSGSDCCAVCLHEFENDDEIRRLTNCQHIFHRSCLDRWMMGYNQMTCPLCRTPFISDELQVAFNQRVWSESELLAESN

SEQ ID NO: 32829 - DNA, 2271 bp, Arabidopsis thaliana
  misc_feature (1)..(2271): Ceres Seq. ID no. 13601247
aacactagcaagcaaaaattcttcatcgactcaaattcaaaaactcatctctctctatctctatttctctggttccatagctcaccgtcgcatcgcagatctactccttccgcaataaattttaccggcggaggtatcagatctcgccgatctgttgtagcagctactgtattttgggcttctcatttgatattggggaaacgaggagtagaggacgatggaaaatctgatctctctggttaacaagatacagagagcttgcacggctttaggagaccatggagactccagcgctttacctactctttgggattccttgcctgcgatcgccgtcgttggtggtcagagctcagggaagtcttcagtcctggagagcatcgtgggaaaggactttttaccccgtggatctggcattgttactcgaaggccccttgtcttacagttgcaaaagatcgatgatggaacccgggagtatgcagagtttcttcacctcccgaggaaaaagtttactgattttgctgctgtgaggaaggagattcaagatgagactgacagagagactggacgcagcaaggctatttctagtgttcccattcaccttagcatatactctcccaatgttgtcaacttgacactgatagatcttccagggcttacaaaagttgctgttgatggacaatctgatagtatagtgaaggacattgaaaacatggttcggtcctacattgaaaagcccaactgcatcattttggcaatctcacctgcaaaccaagatcttgctacctcagatgcaattaaaatttcccgtgaggttgatccatcgggggacagaacatttggtgtcttgacaaagattgatcttatggacaaggggacggatgcagtggaaattctggaagggagatcttttaaacttaaatatccgtgggttggtgtcgtcaaccgttcccaagcagatattaacaagaatgtcgacatgattgcggctcggaaaagagagagggagtacttttccaatactactgagtataggcaccttgctaataaaatgggttccgagcatttggcaaagatgctctccaagcatctagaacgtgtgatcaagtcgagaattcctggcattcagtcacttattaacaaaacagtattagagctggaaactgaactaagtcgccttggaaagcctattgcagctgatgcaggggggaagttgtactcaataatggagatatgtcggctttttgatcaaatattcaaagagcatcttgatggagtgcgtgctggtggtgaaaaagtgtacaacgtgtttgataaccagcttcctgcggctctgaagagactccaatttgacaagcagctagcgatggacaacatccggaagctggtcactgaggctgatggttaccagcctcacttgattgctcctgagcaaggttaccgtcgtctcattgagtcttctattgtctccatcagaggccctgctgaagcatctgttgacaccgttcatgctatcttaaaggatctggttcacaagtctgtgaatgaaactgtggaactaaaacaatacccagctctgagagtggaggtgacaaatgcggcgatagagtcgctggataaaatgcgggaaggaagtaagaaagcaacactgcagctggttgacatggagtgcagttacctcactgttgatttcttcaggaaacttccccaggatgttgagaagggtggtaaccccacacactccattttcgaccgctacaacgattcctatctcagacgaatcggatccaatgttttgtcttacgtgaacatggtctgtgctggcctgcggaattcaatccccaagtccatcgtatactgccaagtccgagaagcgaagcgcagtctcctcgaccatttctttgcggagctcggtaccatggatatgaagaggctctcgtcgctattgaacgaagatccagcaatcatggagagacgcagtgccatctcaaagcggctagaattgtatcgagcagcccaatccgagatcgatgctgttgcttggtccaagtgataccggcatgtcatgtccactgttttgctcggttctggtcggtgtggctcagactcggagcagagatttagggtctgtaatttgtataagatgatcttcccgataccatgcagtatcgttttatataacatccacattgtttgtcctacctctatgttttttgtccatcacccgatatgttacgtatcgttttataacatccacattgtttgtcctgcctc

SEQ ID NO: 32830 - protein, 610 aa, Arabidopsis thaliana
  misc_feature (1)..(610): Ceres Seq. ID no. 13601248
MENLISLVNKIQRACTALGDHGDSSALPTLWDSLPAIAVVGGQSSGKSSVLESIVGKDFLPRGSGIVTRRPLVLQLQKIDDGTREYAEFLHLPRKKFTDFAAVRKEIQDETDRETGRSKAISSVPIHLSIYSPNVVNLTLIDLPGLTKVAVDGQSDSIVKDIENMVRSYIEKPNCIILAISPANQDLATSDAIKISREVDPSGDRTFGVLTKIDLMDKGTDAVEILEGRSFKLKYPWVGVVNRSQADINKNVDMIAARKREREYFSNTTEYRHLANKMGSEHLAKMLSKHLERVIKSRIPGIQSLINKTVLELETELSRLGKPIAADAGGKLYSIMEICRLFDQIFKEHLDGVRAGGEKVYNVFDNQLPAALKRLQFDKQLAMDNIRKLVTEADGYQPHLIAPEQGYRRLIESSIVSIRGPAEASVDTVHAILKDLVHKSVNETVELKQYPALRVEVTNAAIESLDKMREGSKKATLQLVDMECSYLTVDFFRKLPQDVEKGGNPTHSIFDRYNDSYLRRIGSNVLSYVNMVCAGLRNSIPKSIVYCQVREAKRSLLDHFFAELGTMDMKRLSSLLNEDPAIMERRSAISKRLELYRAAQSEIDAVAWSK

SEQ ID NO: 32831 - protein, 446 aa, Arabidopsis thaliana
  misc_feature (1)..(446): Ceres Seq. ID no. 13601249
MVRSYIEKPNCIILAISPANQDLATSDAIKISREVDPSGDRTFGVLTKIDLMDKGTDAVEILEGRSFKLKYPWVGVVNRSQADINKNVDMIAARKREREYFSNTTEYRHLANKMGSEHLAKMLSKHLERVIKSRIPGIQSLINKTVLELETELSRLGKPIAADAGGKLYSIMEICRLFDQIFKEHLDGVRAGGEKVYNVFDNQLPAALKRLQFDKQLAMDNIRKLVTEADGYQPHLIAPEQGYRRLIESSIVSIRGPAEASVDTVHAILKDLVHKSVNETVELKQYPALRVEVTNAAIESLDKMREGSKKATLQLVDMECSYLTVDFFRKLPQDVEKGGNPTHSIFDRYNDSYLRRIGSNVLSYVNMVCAGLRNSIPKSIVYCQVREAKRSLLDHFFAELGTMDMKRLSSLLNEDPAIMERRSAISKRLELYRAAQSEIDAVAWSK

SEQ ID NO: 32832 - protein, 395 aa, Arabidopsis thaliana
  misc_feature (1)..(395): Ceres Seq. ID no. 13601250
MDKGTDAVEILEGRSFKLKYPWVGVVNRSQADINKNVDMIAARKREREYFSNTTEYRHLANKMGSEHLAKMLSKHLERVIKSRIPGIQSLINKTVLELETELSRLGKPIAADAGGKLYSIMEICRLFDQIFKEHLDGVRAGGEKVYNVFDNQLPAALKRLQFDKQLAMDNIRKLVTEADGYQPHLIAPEQGYRRLIESSIVSIRGPAEASVDTVHAILKDLVHKSVNETVELKQYPALRVEVTNAAIESLDKMREGSKKATLQLVDMECSYLTVDFFRKLPQDVEKGGNPTHSIFDRYNDSYLRRIGSNVLSYVNMVCAGLRNSIPKSIVYCQVREAKRSLLDHFFAELGTMDMKRLSSLLNEDPAIMERRSAISKRLELYRAAQSEIDAVAWSK

SEQ ID NO: 32833 - DNA, 786 bp, Arabidopsis thaliana
  misc_feature (1)..(786): Ceres Seq. ID no. 13601270
aacaacacttagagaacaagcagaggaatataactttttttttctttttcctttttgcttttttacaaccaaaaaaataaagcaagccgtagagagcaagagacggtgtaaagatgcactacacacgcatctcgccggctttagtaccatctctatcaccaaccgccgcggctgaatctagcggtggtgggacgatgatagctactgttttcatggcccttctcctcccctgcgtcggcatgtgcatcgtcttcctaatctatctattcctcttgtggtgctccacacggcgtcgtatcgaacgccttcgatttgctgaaccggttaaaccggtcacaggtaaaggcctttcggtgttggagctcgagaaaatccctaaactcaccggaagagagctagccgtaatagctagatcaacggaatgtgctgtttgccttgaagatatagagagtggtcaatcgactcgtctagttcccggttgcaaccatgggtttcaccaattatgtgctgatacgtggctatctaaccacacggtttgtccagtttgccgcgccgagctggctccgaacctacctcaatgtaatgaaaatcaaagtccatgttagaaacagaattttcaaaaacattctttccttcttttttactcgttttgtgtacttctcttgtttttcccttttcttagttttgtgtaagcgttatagagagagaagtttccaggttgtaactagccttgttgtttttttttgtacatgaaattagttttagagtaaattacgaaatttacag

SEQ ID NO: 32834 - protein, 163 aa, Arabidopsis thaliana
  misc_feature (1)..(163): Ceres Seq. ID no. 13601271
MHYTRISPALVPSLSPTAAAESSGGGTMIATVFMALLLPCVGMCIVFLIYLFLLWCSTRRRIERLRFAEPVKPVTGKGLSVLELEKIPKLTGRELAVIARSTECAVCLEDIESGQSTRLVPGCNHGFHQLCADTWLSNHTVCPVCRAELAPNLPQCNENQSPC

SEQ ID NO: 32835 - protein, 136 aa, Arabidopsis thaliana
  misc_feature (1)..(136): Ceres Seq. ID no. 13601272
MIATVFMALLLPCVGMCIVFLIYLFLLWCSTRRRIERLRFAEPVKPVTGKGLSVLELEKIPKLTGRELAVIARSTECAVCLEDIESGQSTRLVPGCNHGFHQLCADTWLSNHTVCPVCRAELAPNLPQCNENQSPC

SEQ ID NO: 32836 - protein, 130 aa, Arabidopsis thaliana
  misc_feature (1)..(130): Ceres Seq. ID no. 13601273
MALLLPCVGMCIVFLIYLFLLWCSTRRRIERLRFAEPVKPVTGKGLSVLELEKIPKLTGRELAVIARSTECAVCLEDIESGQSTRLVPGCNHGFHQLCADTWLSNHTVCPVCRAELAPNLPQCNENQSPC

SEQ ID NO: 32837 - DNA, 1351 bp, Arabidopsis thaliana
  misc_feature (1)..(1351): Ceres Seq. ID no. 13601282
cggtcgggatatttggcgagccgacccgtcgcgtcgtgggtttaggtttaacgtattggcgcgccagtgaagaaaatagacgacgatggcgatgatgcatcctccgcagccgccgcaaggctcctatcaccatcctcagacgctcgaagaagttcgaactctttggattggtgatttgcagtactgggtcgacgaaaattacctcacttcctgcttctcccaaaccggcgagctcgtttctgtcaaggtaatacgtaacaagatcacgggacagccagaggggtatggttttatagagtttatatctcatgcagcagcagagagaactctgcagacgtacaatgggacacagatgcctggaactgagttaacttttcggttaaattgggcttcttttggttcaggacagaaagttgatgctggacctgatcattctatctttgttggagatttagcacctgatgttacagattatcttcttcaagagacattccgtgttcattattcttctgttagaggtgccaaggttgttactgatccaagtactggacgatcaaagggttatggatttgtaaaatttgcagaggaaagtgaaaggaatcgggctatggctgaaatgaatggtttgtattgctcaacaaggcctatgcgtattagcgcagcaacacctaaaaaaaacgtcggtgtgcagcaacaatatgtcaccaaagttacagtcccatctgcagttgctgcaccagtccaagcatacgttgctccacctgaaagtgatgtcacctgtacaacgatttcagttgccaatttggaccaaaatgttacagaggaagagctgaagaaagcattctcccaattaggagaggttatttatgtcaaaatacctgcaacaaagggatatggttatgttcaattcaaaaccaggccttctgcagaagaagctgttcaaagaatgcagggacaagtgattggtcaacaagcagttcgcatctcttggagtaaaaatccaggacaggatggttgggttacacaagcagatccgaatcagtggaatgggtattatggttatgggcaaggctatgatgcatatgcttatggggcaactcaagatccatccgtgtacgcatatggtggatatggctatccccagtatccgcaacagggagagggtacacaagacatttcgaactctgcggcgggtggagtagcaggtgcagagcaagagttgtatgatcctctggccactcctgatgtagacaagttaaatgctgcttacctttcggttcatgcaagtgccatattaggaaggccaatgtggcagcggacctcatcgctcacatcacaattgggcaaatga

SEQ ID NO: 32838 - protein, 421 aa, Arabidopsis thaliana
  misc_feature (1)..(421): Ceres Seq. ID no. 13601283
MAMMHPPQPPQGSYHHPQTLEEVRTLWIGDLQYWVDENYLTSCFSQTGELVSVKVIRNKITGQPEGYGFIEFISHAAAERTLQTYNGTQMPGTELTFRLNWASFGSGQKVDAGPDHSIFVGDLAPDVTDYLLQETFRVHYSSVRGAKVVTDPSTGRSKGYGFVKFAEESERNRAMAEMNGLYCSTRPMRISAATPKKNVGVQQQYVTKVTVPSAVAAPVQAYVAPPESDVTCTTISVANLDQNVTEEELKKAFSQLGEVIYVKIPATKGYGYVQFKTRPSAEEAVQRMQGQVIGQQAVRISWSKNPGQDGWVTQADPNQWNGYYGYGQGYDAYAYGATQDPSVYAYGGYGYPQYPQQGEGTQDISNSAAGGVAGAEQELYDPLATPDVDKLNAAYLSVHASAILGRPMWQRTSSLTSQLGK

SEQ ID NO: 32839 - protein, 419 aa, Arabidopsis thaliana
  misc_feature (1)..(419): Ceres Seq. ID no. 13601284
MMHPPQPPQGSYHHPQTLEEVRTLWIGDLQYWVDENYLTSCFSQTGELVSVKVIRNKITGQPEGYGFIEFISHAAAERTLQTYNGTQMPGTELTFRLNWASFGSGQKVDAGPDHSIFVGDLAPDVTDYLLQETFRVHYSSVRGAKVVTDPSTGRSKGYGFVKFAEESERNRAMAEMNGLYCSTRPMRISAATPKKNVGVQQQYVTKVTVPSAVAAPVQAYVAPPESDVTCTTISVANLDQNVTEEELKKAFSQLGEVIYVKIPATKGYGYVQFKTRPSAEEAVQRMQGQVIGQQAVRISWSKNPGQDGWVTQADPNQWNGYYGYGQGYDAYAYGATQDPSVYAYGGYGYPQYPQQGEGTQDISNSAAGGVAGAEQELYDPLATPDVDKLNAAYLSVHASAILGRPMWQRTSSLTSQLGK

SEQ ID NO: 32840 - protein, 418 aa, Arabidopsis thaliana
  misc_feature (1)..(418): Ceres Seq. ID no. 13601285
MHPPQPPQGSYHHPQTLEEVRTLWIGDLQYWVDENYLTSCFSQTGELVSVKVIRNKITGQPEGYGFIEFISHAAAERTLQTYNGTQMPGTELTFRLNWASFGSGQKVDAGPDHSIFVGDLAPDVTDYLLQETFRVHYSSVRGAKVVTDPSTGRSKGYGFVKFAEESERNRAMAEMNGLYCSTRPMRISAATPKKNVGVQQQYVTKVTVPSAVAAPVQAYVAPPESDVTCTTISVANLDQNVTEEELKKAFSQLGEVIYVKIPATKGYGYVQFKTRPSAEEAVQRMQGQVIGQQAVRISWSKNPGQDGWVTQADPNQWNGYYGYGQGYDAYAYGATQDPSVYAYGGYGYPQYPQQGEGTQDISNSAAGGVAGAEQELYDPLATPDVDKLNAAYLSVHASAILGRPMWQRTSSLTSQLGK

SEQ ID NO: 32841 - DNA, 1020 bp, Arabidopsis thaliana
  misc_feature (1)..(1020): Ceres Seq. ID no. 13601286
ttacccaaaagaacccataatgtttagagtgaccggaactctctcggcggcatcatctccagcggtggcggcggcgtctttctccgccgctctaagactttccataactcccactctcgctatcgcctctcctccccatctccgttggttctcgaagttttctcgtcaatttctcggcggacgcatctcttcactccgaccacgcattccttctccgtgcccgattcgactctctggtttcccggctctcaaaatgagagcttcgtttagcagtgggagtagtggaagtagtgcaagtagagagattctggtgcagcatttgcttgttaagaataatgatgttgagctctttgccgaactccaaaagaaattcttggatggagaggagatgagtgatcttgcggctgagtattcgatttgtccttccaaaaaggacggtggtatacttggatgggtaaaactgggtcaaatggtaccagagtttgaggaagctgcgtttaaagcagagctgaatcaggtggtgaggtgtagaacccaatttggcttgcacttattgcaagttctatctgagagagaaccggtgaaagatatccaggtagaggagctgcattccaaaatgcaagatccagttttcatggatgaggctcagttaattgatgtcagagaacccaatgagatagagatagcatccttgccaggattcaaagtgttcccactccgccaatttggaacatgggcaccagacatcacttcaaagctgaaccctgagaaggatacatttgtcttgtgcaaggttggtggcaggtcaatgcaggttgccaactggttacagtctcagggcttcaagagtgtgtacaacattactggtgggatacaagcttattctctcaaggttgacccatcaattcctacttactgaaattgagcatcttagtctctttttcttgtatcctcctaattccaaattagatttgcaaattcgtattcaataaactatataatataaggttcatttttgag

SEQ ID NO: 32842 - protein, 305 aa, Arabidopsis thaliana
  misc_feature (1)..(305): Ceres Seq. ID no. 13601287
YPKEPIMFRVTGTLSAASSPAVAAASFSAALRLSITPTLAIASPPHLRWFSKFSRQFLGGRISSLRPRIPSPCPIRLSGFPALKMRASFSSGSSGSSASREILVQHLLVKNNDVELFAELQKKFLDGEEMSDLAAEYSICPSKKDGGILGWVKLGQMVPEFEEAAFKAELNQVVRCRTQFGLHLLQVLSEREPVKDIQVEELHSKMQDPVFMDEAQLIDVREPNEIEIASLPGFKVFPLRQFGTWAPDITSKLNPEKDTFVLCKVGGRSMQVANWLQSQGFKSVYNITGGIQAYSLKVDPSIPTY

SEQ ID NO: 32843 - protein, 299 aa, Arabidopsis thaliana
  misc_feature (1)..(299): Ceres Seq. ID no. 13601288
MFRVTGTLSAASSPAVAAASFSAALRLSITPTLAIASPPHLRWFSKFSRQFLGGRISSLRPRIPSPCPIRLSGFPALKMRASFSSGSSGSSASREILVQHLLVKNNDVELFAELQKKFLDGEEMSDLAAEYSICPSKKDGGILGWVKLGQMVPEFEEAAFKAELNQVVRCRTQFGLHLLQVLSEREPVKDIQVEELHSKMQDPVFMDEAQLIDVREPNEIEIASLPGFKVFPLRQFGTWAPDITSKLNPEKDTFVLCKVGGRSMQVANWLQSQGFKSVYNITGGIQAYSLKVDPSIPTY

SEQ ID NO: 32844 - protein, 221 aa, Arabidopsis thaliana
  misc_feature (1)..(221): Ceres Seq. ID no. 13601289
MRASFSSGSSGSSASREILVQHLLVKNNDVELFAELQKKFLDGEEMSDLAAEYSICPSKKDGGILGWVKLGQMVPEFEEAAFKAELNQVVRCRTQFGLHLLQVLSEREPVKDIQVEELHSKMQDPVFMDEAQLIDVREPNEIEIASLPGFKVFPLRQFGTWAPDITSKLNPEKDTFVLCKVGGRSMQVANWLQSQGFKSVYNITGGIQAYSLKVDPSIPTY

SEQ ID NO: 32845 - DNA, 1680 bp, Arabidopsis thaliana
  misc_feature (1)..(1680): Ceres Seq. ID no. 13601290
gctcaaaagaaattgtgatacgcgaaagaaagaaaaaaattactttcaactaaaagaagcacacagcacaaaagaggtagtctcgttgtgatgtcagtataaagccagttgacgcaattccatctcccgatcgaacctgtacaaaccatggcaacaacgagctccgaccggttaatcgccggtttaacggcgtcgatcggctcaatcgaatctcgttacgcaaatccagctcaatccgtttctctaatctgtcgaaatcaaatcaatggcgcaccgcctatcgtcttgcggtcctctcgaaggtccaggctgtggttaatcgaggcgattcctccggcaaagtcctggaacggatctaacgatggcgacgaagatatcaagaagtcagacactcgtaattacgcgatcggtggaaccggtggtcacgcggtcgccggaaaagatgacagaacgatggagatagtaatagcagcggcgaccacggcggcgctgggtgtcgggaatcgcgtactgtataagctggctcttattcctctcaagcaatatcccttcttcctcgcgcaactctccacattcgggtatgtagctgtatacttttcgattttgtatttcagataccgagctggaattgttacaaaagagatgctatcagttccaaaacttccatttttaattgttggcgtcttggagtctcttgctctagctgctgggatggcggccgcatcaaatctttctggaccatctactacagttttatctcagacatttcttgtctggcaaattcttttctccattatatttctcgggaggagatatagaataaatcaaatattgggatgtactcttgtagcatttggtgtaatcgtcagtgtagcaagtgggtcgggtgccgctcattcatttaaagatacaggaatactttggagtcttcttatggtgttttcttttctgcttcaaggagcagatacagtaatgaaggaagtcatctttctagatagcaaaaagcgattgaagggtgcttcacttgatttgtttgttgtaaactcatatggttcaattttccaagtcatatgcattgcgttgcttcttccttttctttcaaagctttggggcataccgtttaaccaactaccgagctatatcagagacgggggtgcttgctttctaaatattggttctagaataacaggatgcgaaggggctccccttcttcctgtaatgtttgtcatgatgaacatggcttataacatctctcttctacgcctcatcaagatttcatctgcagttgtgtcgtctctggcatccaccgtttcagtgcccatagcggtgtactgtttcacgcttcccctaccataccttggggtggcatctacactaccaagggggtttgttgcaggcacaatcatccttgtagtcggcatgcttctatatgcttggacaccatctactaacacttccgattcaattatcccctcacccccatccacatagcggcaggaaaattggtttttgtaacattatttggtttccttctctcttctcatcttagcatatgctctttttttgtcaaataagaaatttttttatgcattctttacaaaagaatggttagttttcagttttgcttttcaaaaactatgcagaggataatgtactttgtaatgatgtatatcaattatc

SEQ ID NO: 32846 - protein, 447 aa, Arabidopsis thaliana
  misc_feature (1)..(447): Ceres Seq. ID no. 13601291
MATTSSDRLIAGLTASIGSIESRYANPAQSVSLICRNQINGAPPIVLRSSRRSRLWLIEAIPPAKSWNGSNDGDEDIKKSDTRNYAIGGTGGHAVAGKDDRTMEIVIAAATTAALGVGNRVLYKLALIPLKQYPFFLAQLSTFGYVAVYFSILYFRYRAGIVTKEMLSVPKLPFLIVGVLESLALAAGMAAASNLSGPSTTVLSQTFLVWQILFSIIFLGRRYRINQILGCTLVAFGVIVSVASGSGAAHSFKDTGILWSLLMVFSFLLQGADTVMKEVIFLDSKKRLKGASLDLFVVNSYGSIFQVICIALLLPFLSKLWGIPFNQLPSYIRDGGACFLNIGSRITGCEGAPLLPVMFVMMNMAYNISLLRLIKISSAVVSSLASTVSVPIAVYCFTLPLPYLGVASTLPRGFVAGTIILVVGMLLYAWTPSTNTSDSIIPSPPST

SEQ ID NO: 32847 - protein, 345 aa, Arabidopsis thaliana
  misc_feature (1)..(345): Ceres Seq. ID no. 13601292
MEIVIAAATTAALGVGNRVLYKLALIPLKQYPFFLAQLSTFGYVAVYFSILYFRYRAGIVTKEMLSVPKLPFLIVGVLESLALAAGMAAASNLSGPSTTVLSQTFLVWQILFSIIFLGRRYRINQILGCTLVAFGVIVSVASGSGAAHSFKDTGILWSLLMVFSFLLQGADTVMKEVIFLDSKKRLKGASLDLFVVNSYGSIFQVICIALLLPFLSKLWGIPFNQLPSYIRDGGACFLNIGSRITGCEGAPLLPVMFVMMNMAYNISLLRLIKISSAVVSSLASTVSVPIAVYCFTLPLPYLGVASTLPRGFVAGTIILVVGMLLYAWTPSTNTSDSIIPSPPST

SEQ ID NO: 32848 - protein, 282 aa, Arabidopsis thaliana
  misc_feature (1)..(282): Ceres Seq. ID no. 13601293
MLSVPKLPFLIVGVLESLALAAGMAAASNLSGPSTTVLSQTFLVWQILFSIIFLGRRYRINQILGCTLVAFGVIVSVASGSGAAHSFKDTGILWSLLMVFSFLLQGADTVMKEVIFLDSKKRLKGASLDLFVVNSYGSIFQVICIALLLPFLSKLWGIPFNQLPSYIRDGGACFLNIGSRITGCEGAPLLPVMFVMMNMAYNISLLRLIKISSAVVSSLASTVSVPIAVYCFTLPLPYLGVASTLPRGFVAGTIILVVGMLLYAWTPSTNTSDSIIPSPPST

SEQ ID NO: 32849 - DNA, 1205 bp, Arabidopsis thaliana
  misc_feature (1)..(1205): Ceres Seq. ID no. 13601294
acgcattcgtcatttggtccctccacttagagagaagcagacagaacataactaaaatcgagaaaaatggcaaacagtggtgaaggtaaagtggtgtgtgtaacaggagcctccggttacatcgcctcatggctcgtcaagttcctacttagccgtggctacactgttaaggcctccgtccgtgatcccagtgatccgaaaaagacacaacacttagtttcactagaaggtgcaaaggaaagacttcacttgttcaaagcagaccttttggaacaaggttctttcgactctgctattgatggttgccatggagttttccacactgcttctccattttttaatgatgccaaagacccacaggctgaacttattgatcctgcggtcaaggggacgcttaacgttttgaattcgtgcgccaaagcctcttcggttaagagggttgttgtaacctcctccatggctgccgttggttacaatggaaaaccacgcacacctgatgttaccgtcgatgaaacttggttctctgatcctgagctttgcgaggcctccaagatgtggtatgttctatccaagactttggcggaagatgcagcttggaaactcgctaaagagaaaggcttagacattgttactattaacccggctatggtgatcggtcctctcctacagccaactctgaacacgagtgctgctgctatattaaacttaatcaatggtgcaaagactttcccaaacttgagtttcggatgggttaatgtaaaagacgtagccaatgcgcacatccaagcatttgaggtcccttcagctaatgggcgttattgtttggtcgagcgtgtcgttcaccactccgagattgttaacattctacgtgagctttacccaaatctcccactacctgaaaggtgtgtggacgagaatccctacgtgccaacgtatcaagtgtccaaggataaaacgaggagccttggcatagactacatacccttgaaggttagcatcaaggagaccgtcgagtccttgaaggaaaaaggtttcgcacagttctgagaaagcatttgagccaatggatttaatccagattagataaagtatttggaagactatttcagaaataatatttggaacatgtcaatgttctcaaggagatattagtatgttcttgtgtactttattgttgttccatcaaatgagttacttttcctttt

SEQ ID NO: 32850 - protein, 326 aa, Arabidopsis thaliana
  misc_feature (1)..(326): Ceres Seq. ID no. 13601295
MANSGEGKVVCVTGASGYIASWLVKFLLSRGYTVKASVRDPSDPKKTQHLVSLEGAKERLHLFKADLLEQGSFDSAIDGCHGVFHTASPFFNDAKDPQAELIDPAVKGTLNVLNSCAKASSVKRVVVTSSMAAVGYNGKPRTPDVTVDETWFSDPELCEASKMWYVLSKTLAEDAAWKLAKEKGLDIVTINPAMVIGPLLQPTLNTSAAAILNLINGAKTFPNLSFGWVNVKDVANAHIQAFEVPSANGRYCLVERVVHHSEIVNILRELYPNLPLPERCVDENPYVPTYQVSKDKTRSLGIDYIPLKVSIKETVESLKEKGFAQF

SEQ ID NO: 32851 - protein, 196 aa, Arabidopsis thaliana
  misc_feature (1)..(196): Ceres Seq. ID no. 13601296
MAAVGYNGKPRTPDVTVDETWFSDPELCEASKMWYVLSKTLAEDAAWKLAKEKGLDIVTINPAMVIGPLLQPTLNTSAAAILNLINGAKTFPNLSFGWVNVKDVANAHIQAFEVPSANGRYCLVERVVHHSEIVNILRELYPNLPLPERCVDENPYVPTYQVSKDKTRSLGIDYIPLKVSIKETVESLKEKGFAQF

SEQ ID NO: 32852 - protein, 164 aa, Arabidopsis thaliana
  misc_feature (1)..(164): Ceres Seq. ID no. 13601297
MWYVLSKTLAEDAAWKLAKEKGLDIVTINPAMVIGPLLQPTLNTSAAAILNLINGAKTFPNLSFGWVNVKDVANAHIQAFEVPSANGRYCLVERVVHHSEIVNILRELYPNLPLPERCVDENPYVPTYQVSKDKTRSLGIDYIPLKVSIKETVESLKEKGFAQF

SEQ ID NO: 32853 - DNA, 1382 bp, Arabidopsis thaliana
  misc_feature (1)..(1382): Ceres Seq. ID no. 13601305
agttccccacaaagctcgttgtcgtcatcgcgcgagcttgaaccaaaaaaaccatgaacagtgagaaggaagacgagccattggaagagatcggcgattcgaataatgttctcgatctcactagctatcagctccacagtctcgatacggtcgagttaccgccgaacctgattgagctggaccttacggcgaaccgtttgtcgggattggactcgaggatcgctcagctctccacgcttaagaagctttctctccgccaaaacctaattgatgattccgccgtcgaaccgttgtctcactgggacgccttgtccgatctcgaggagttagttctcagagataacaagctagcgaaagtaccagatgtcagcatattcacgaagcttttggtttacgacatatctttcaatgaaatcacttctttggaaggaatatccaaggcctctagcacactgaaggaactctatgtgtctaaaaatgaagttaacaagattatggagattgaacacttacacaacttgcagattcttgaactggggtctaatagattgcgggtgatggaaaatctggaaaacttcacaaaattagaagaactatggctcggaagaaaccgtatcaaagttgttaacctgtgtgggctcaaatgcataaaaaagattagcttgcagagcaatcgattgacctctatgaaaggatttgaggaatgtgttgctcttgaagagttatatttgagccataatggtatctccaaaatggaaggcttgagtgcattggtcaacctacgggtattggacgtgtcgaacaacaagcttacttcagttgatgacattcagaacctcacaaagttggaagatttgtggcttaatgacaaccagatagaatcactggaagcaatcacagaagctgttacaggatctaaagagaagcttaccactatctacctcgaaaataacccttgtgccaagtcttctgattatgttgctgcggtcagacaaatcttcccgaatgtggagcaaattgattctaacttatttgcttagagatggatatattccttgtcgtgctgtttgtatgaatgtctgcttcctcatcccatgggcatgggcatcgaatttaggaaatcaggtacaacacggattcctcaaaatatacatgtgtctgctgtttatcataaagaagtgcaaatgagcaaattaaatcgctctcgtcatggatatttattaaaacgtttttgaaattctagtgttcccttgcaagtaaaccaattcttgtttttggtctgtaatagtatgtggactgtgtctgtaaaagggaatccccgagtctgaagttgtctttgtttcaagtttcaaccgagaacactaacttgaatactttgatcc

SEQ ID NO: 32854 - protein, 328 aa, Arabidopsis thaliana
  misc_feature (1)..(328): Ceres Seq. ID no. 13601306
MNSEKEDEPLEEIGDSNNVLDLTSYQLHSLDTVELPPNLIELDLTANRLSGLDSRIAQLSTLKKLSLRQNLIDDSAVEPLSHWDALSDLEELVLRDNKLAKVPDVSIFTKLLVYDISFNEITSLEGISKASSTLKELYVSKNEVNKIMEIEHLHNLQILELGSNRLRVMENLENFTKLEELWLGRNRIKVVNLCGLKCIKKISLQSNRLTSMKGFEECVALEELYLSHNGISKMEGLSALVNLRVLDVSNNKLTSVDDIQNLTKLEDLWLNDNQIESLEAITEAVTGSKEKLTTIYLENNPCAKSSDYVAAVRQIFPNVEQIDSNLFA

SEQ ID NO: 32855 - protein, 181 aa, Arabidopsis thaliana
  misc_feature (1)..(181): Ceres Seq. ID no. 13601307
MEIEHLHNLQILELGSNRLRVMENLENFTKLEELWLGRNRIKVVNLCGLKCIKKISLQSNRLTSMKGFEECVALEELYLSHNGISKMEGLSALVNLRVLDVSNNKLTSVDDIQNLTKLEDLWLNDNQIESLEAITEAVTGSKEKLTTIYLENNPCAKSSDYVAAVRQIFPNVEQIDSNLFA

SEQ ID NO: 32856 - DNA, 1285 bp, Arabidopsis thaliana
  misc_feature (1)..(1285): Ceres Seq. ID no. 13601322
ttttgttctttctcagagatctaaaccatcatggctacttccttcttccggcgactcgctaggtcagctccgattacattccctgtcgcatttggatctcaaagcaaatctggttctggcgctttccggttctccaccggtgcaatcgcggcactttccggtggattctcctattactacttgacatccggcaacaatctggtttatctggatcaagctaaggaagagacaggaccaaaaaccgctctaaaccctgataaatggctcgagttcaagcttcaagacactgctagagttagccacaacactcagttgttcaggttctcatttgacccctcagctgagttgggtctacatgttgcttcttgtctcctgacaagggctcctttaggctataatgctgaagggaaaacgaaatatgtcattagaccttacactcctatatcagatccagaggctaagggctattttgatttactgattaaggtatatcctgacggaaaaatgagtcagcattttgccagcttaaaaccgggggatgtgttggaagtaaaaggacccgttgaaaagttcaaatactcgccgaatatgaagaaacatattggcatgattgccggtggaagtgggattactccaatgcttcaggtgattgatgccattgtgaagaatcctgaggacaacacgcagatatcattgctttatgccaatgtgtcaccagatgatatactcctgaagcagaagcttgatgtacttcaggctaaccacccaaatttgaagatattctatactgttgacaaccctactaaaaactggaaaggaggagtaggttacatttcaaaggatatggctctgaaaggcttacctcttcctaccgacgatactcttatccttgtatgcggtcctcctgggatgatggagcatatatctggaggcaaagctccagactggtcacaaggagaggtcaaggggattctcaaggaactcggatacacagaggaaatggtgttcaaattctgagtggactagagaatcagaatacgatctcaaggaggtttcctttcatgtaataaaatggccccaagcaaacattaattgatgcagagtgagcttgacaatcgagctaccgagctttgaaaataaacaaagcaaaacggatcagttagtcatttgtctctgcaggtaatagcggaacttgattttgatggtaaatttctatgcaaccaagatattgaatatggttcgaaagatgataattgtgcgtttaaaattcgcgtctgtgttttgg

SEQ ID NO: 32857 - protein, 328 aa, Arabidopsis thaliana
  misc_feature (1)..(328): Ceres Seq. ID no. 13601323
MATSFFRRLARSAPITFPVAFGSQSKSGSGAFRFSTGAIAALSGGFSYYYLTSGNNLVYLDQAKEETGPKTALNPDKWLEFKLQDTARVSHNTQLFRFSFDPSAELGLHVASCLLTRAPLGYNAEGKTKYVIRPYTPISDPEAKGYFDLLIKVYPDGKMSQHFASLKPGDVLEVKGPVEKFKYSPNMKKHIGMIAGGSGITPMLQVIDAIVKNPEDNTQISLLYANVSPDDILLKQKLDVLQANHPNLKIFYTVDNPTKNWKGGVGYISKDMALKGLPLPTDDTLILVCGPPGMMEHISGGKAPDWSQGEVKGILKELGYTEEMVFKF

SEQ ID NO: 32858 - protein, 170 aa, Arabidopsis thaliana
  misc_feature (1)..(170): Ceres Seq. ID no. 13601324
MSQHFASLKPGDVLEVKGPVEKFKYSPNMKKHIGMIAGGSGITPMLQVIDAIVKNPEDNTQISLLYANVSPDDILLKQKLDVLQANHPNLKIFYTVDNPTKNWKGGVGYISKDMALKGLPLPTDDTLILVCGPPGMMEHISGGKAPDWSQGEVKGILKELGYTEEMVFKF

SEQ ID NO: 32859 - DNA, 1086 bp, Arabidopsis thaliana
  misc_feature (1)..(1086): Ceres Seq. ID no. 13601332
ctctctttcttcttcattcatcattctcacttaagtttcccagaaaataaaagagctatgaagtttggtaagagtctcagcaatcagatcgagcaaactcttcctgaatggcaagacaagttcttgtcttacaaagaactcaaaaaacgactcaaactcatcggttccaaaaccgccgatcgtcccgttaaacgactccgtttagatgagttttccgtcggaatatcgaaagaagagatcaatttcatccaattgttagaagacgagttggagaaattcaacaatttcttcgttgagaaggaagaagaatatatcatcagactaaaggaatttagagatagaattgcgaaagctaaggattcaatggagaagatgataaaaatcaggaaggagattgttgatttccatggagaaatggttcttcttgagaattacagtgctcttaattacactggattggttaagatactgaagaagtatgacaaaagaactggtgatctcatgcgtttacctttcatccagaaagttcttcagcaacctttttacactactgacttattgttcaagcttgtcaaggaatctgaggcaatgcttgatcagatcttccctgctaacgaaactgagtctgagattatccaagcagagttatcagagcataagttcatggagagtcttcatatgaagagcacaatcgctgccttgcgggttttgaaggagatcaggagtggaagttctactgttagtgtgttttcattgccgcctctacagttaaatggcttagatgagacatggaagaagattccattgttggagcaagaagccaaatagagagtgagacagaggcacactcgctctattccacttttttatacaatagaagaagctaacagattaaacaagacattatcatcaatgtacacaaaaaggcagaagaaactataggatcatgtttctggatatcatctttggtcggtcataagtccttaggttacacaaaactgcaatgtaactttgtttctgtgttgggtgtgttgtagttgatgtaatatataccacttcagattaattattgatttcttcttttcc

SEQ ID NO: 32860 - protein, 275 aa, Arabidopsis thaliana
  misc_feature (1)..(275): Ceres Seq. ID no. 13601333
LSFFFIHHSHLSFPENKRAMKFGKSLSNQIEQTLPEWQDKFLSYKELKKRLKLIGSKTADRPVKRLRLDEFSVGISKEEINFIQLLEDELEKFNNFFVEKEEEYIIRLKEFRDRIAKAKDSMEKMIKIRKEIVDFHGEMVLLENYSALNYTGLVKILKKYDKRTGDLMRLPFIQKVLQQPFYTTDLLFKLVKESEAMLDQIFPANETESEIIQAELSEHKFMESLHMKSTIAALRVLKEIRSGSSTVSVFSLPPLQLNGLDETWKKIPLLEQEAK

SEQ ID NO: 32861 - protein, 256 aa, Arabidopsis thaliana
  misc_feature (1)..(256): Ceres Seq. ID no. 13601334
MKFGKSLSNQIEQTLPEWQDKFLSYKELKKRLKLIGSKTADRPVKRLRLDEFSVGISKEEINFIQLLEDELEKFNNFFVEKEEEYIIRLKEFRDRIAKAKDSMEKMIKIRKEIVDFHGEMVLLENYSALNYTGLVKILKKYDKRTGDLMRLPFIQKVLQQPFYTTDLLFKLVKESEAMLDQIFPANETESEIIQAELSEHKFMESLHMKSTIAALRVLKEIRSGSSTVSVFSLPPLQLNGLDETWKKIPLLEQEAK

SEQ ID NO: 32862 - protein, 154 aa, Arabidopsis thaliana
  misc_feature (1)..(154): Ceres Seq. ID no. 13601335
MEKMIKIRKEIVDFHGEMVLLENYSALNYTGLVKILKKYDKRTGDLMRLPFIQKVLQQPFYTTDLLFKLVKESEAMLDQIFPANETESEIIQAELSEHKFMESLHMKSTIAALRVLKEIRSGSSTVSVFSLPPLQLNGLDETWKKIPLLEQEAK

SEQ ID NO: 32863 - DNA, 1187 bp, Arabidopsis thaliana
  misc_feature (1)..(1187): Ceres Seq. ID no. 13601348
aaactcaagtagaaacaatggagaagccaaagttcaagactgtccaagaggtggttgcagctggcgaaggactgccggagagatatctccacgcacccaccggagacggcgaagttcaacctcttaacgcagcggtaccggagatggatattccggccatcgatctgaatcttctcctctcttcttctgaagctggtcaacaagagctgagtaaacttcactcggcactctctacatggggcgttgttcaggtgatgaatcatggaattacaaaagcgtttcttgacaagatttacaagctaaccaaggagttctttgcgcttccgaccgaagagaaacagaagtgcgcgagagagattgatagtatccaaggatatggtaacgacatgattctttgggatgatcaagttcttgattggatcgaccgtttgtatattactacttaccctgaagatcaaagacaacttaatttctggcctgaagtcccacttggattcagggaaactttacatgaatacacaatgaagcaacggatagtgattgagcaattttttaaggccatggctagatctttggaattagaagagaatagttttctagacatgtatggagaaagtgctacgttggatactagattcaacatgtatccaccatgtccgagcccggacaaggttattggtgttaaaccgcacgctgatggctcggctatcactcttctcttacccgacaaagatgtcggagggcttcagttccagaaagatgggaagtggtataaagctcctatagtccctgatacaattttgatcaatgttggtgatcaaatggagataatgagcaatgggatatacaagagcccggttcatagagtggtgactaacagagaaaaggaaagaatatctgtggcaactttttgcattccaggtgcagataaagagattcagcctgtgaatgagcttgtgtctgaggcaagaccaagattatataaaacagttaagaagtatgtggagctctacttcaagtactatcaacaaggccgaagacctattgaagctgcattgatctgatcacacttttcaagtctcatttattggtttcacaaatgaatctgtttctttcgttacttgagatcctttataagaataaaactgtttccttgtttgttggaatgtgaggctgcattgtgttgc

SEQ ID NO: 32864 - protein, 353 aa, Arabidopsis thaliana
  misc_feature (1)..(353): Ceres Seq. ID no. 13601349
TQVETMEKPKFKTVQEVVAAGEGLPERYLHAPTGDGEVQPLNAAVPEMDIPAIDLNLLLSSSEAGQQELSKLHSALSTWGVVQVMNHGITKAFLDKIYKLTKEFFALPTEEKQKCAREIDSIQGYGNDMILWDDQVLDWIDRLYITTYPEDQRQLNFWPEVPLGFRETLHEYTMKQRIVIEQFFKAMARSLELEENSFLDMYGESATLDTRFNMYPPCPSPDKVIGVKPHADGSAITLLLPDKDVGGLQFQKDGKWYKAPIVPDTILINVGDQMEIMSNGIYKSPVHRVVTNREKERISVATFCIPGADKEIQPVNELVSEARPRLYKTVKKYVELYFKYYQQGRRPIEAALI

SEQ ID NO: 32865 - protein, 348 aa, Arabidopsis thaliana
  misc_feature (1)..(348): Ceres Seq. ID no. 13601350
MEKPKFKTVQEVVAAGEGLPERYLHAPTGDGEVQPLNAAVPEMDIPAIDLNLLLSSSEAGQQELSKLHSALSTWGVVQVMNHGITKAFLDKIYKLTKEFFALPTEEKQKCAREIDSIQGYGNDMILWDDQVLDWIDRLYITTYPEDQRQLNFWPEVPLGFRETLHEYTMKQRIVIEQFFKAMARSLELEENSFLDMYGESATLDTRFNMYPPCPSPDKVIGVKPHADGSAITLLLPDKDVGGLQFQKDGKWYKAPIVPDTILINVGDQMEIMSNGIYKSPVHRVVTNREKERISVATFCIPGADKEIQPVNELVSEARPRLYKTVKKYVELYFKYYQQGRRPIEAALI

SEQ ID NO: 32866 - protein, 306 aa, Arabidopsis thaliana
  misc_feature (1)..(306): Ceres Seq. ID no. 13601351
MDIPAIDLNLLLSSSEAGQQELSKLHSALSTWGVVQVMNHGITKAFLDKIYKLTKEFFALPTEEKQKCAREIDSIQGYGNDMILWDDQVLDWIDRLYITTYPEDQRQLNFWPEVPLGFRETLHEYTMKQRIVIEQFFKAMARSLELEENSFLDMYGESATLDTRFNMYPPCPSPDKVIGVKPHADGSAITLLLPDKDVGGLQFQKDGKWYKAPIVPDTILINVGDQMEIMSNGIYKSPVHRVVTNREKERISVATFCIPGADKEIQPVNELVSEARPRLYKTVKKYVELYFKYYQQGRRPIEAALI

SEQ ID NO: 32867 - DNA, 1750 bp, Arabidopsis thaliana
  misc_feature (1)..(1750): Ceres Seq. ID no. 13601356
aacacatataatttgaccaaagtcgcatctcacggtgagatgagttcttcgtagctccaatggtggtggtggcttcacaatgtcgacttcttcttctttccctcgaaccatcgtctcctacactgtgacaacttcgctcttcatcgttatcttcctatgcagcgtcttcttcttcactagacgcactctcgaaccttctctctctccttaccacaccgccgacatccctctccccgccgtcgatctaccacctcctacgcctctcctccctcaaatcgagcctcacgatggtgacgtcaccgtggaaacgaatcctaaggaggtagaagattcgcgccgcggaggcgatgacgtcgcggtagagactgagctgaaactgaaagatgtggaagattcgcacacggagaaaaccgaggaggaggaagaaggtagaggagaatcgcccggtgaagtttccgtagaatctgtggaacatgcggtgattgagaagatgagaggctgtgatttgtacaagggatcgtgggttaagggcgatgatgagtatccattgtatcagcctggatcgtgtccttatgtggacgatgcttttgattgccagaggaatgggaggcgtgattctgactatcttaattggagatggaagcctgacggttgtgatcttccacggtttaatgctacagacttcttggtgaagctacgaggtaaaagtttgatgttggttggagattcaatgaatcgtaaccagtttgaatcaatgctttgcgttctacgagaaggtttatcggataagagtagaatgtatgaggttcatggccataatataacaaaagggagaggctactttgtattcaagtttgaagattataattgcacagtagagtttgtgaggtcacattttcttgtgagggaaggagttagagcaaatgctcaaggaaatactaatccgaccctttccattgatcgcattgacaagtcacatgctaaatggaagcgagctgacattcttgtctttaacactggacattggtgggttcatggaaagaccgccagagggaaaaactactacaaagaaggtgactacatctacccgaaatttgatgctactgaagcatacagaaggtcgttgaagacttgggcaaaatggatcgatcagaatgtgaatcccaaaaagcagcttgtattttatcgcggatactcctctgcccattttcggggaggtgagtgggactcgggagggtcatgcaacggggaggtagaacctgtgaagaagggttcaatcatcgattcctatcctttgaaaatgaagatagtccaggaagccataaaggagatgcaagttcctgtgattcttctaaacgtgacaaagctgactaatttccgcaaagacggacatccatcaatctacggtaagaccaacacggatggtaagaaagtgtcgacaaggcgacaggattgcagccactggtgcctgccgggagttcccgatgtttggaaccatcttatctacgcatctttgctccttcaaccacattcttaaagttgagctcatacatcaacaaaattagatagaaagagaagagcagaaacaaatgaccagtccagtcttcactgttgtagtagtgatgtcaaattttgtgtaatttattgcccttggagctgataagtagttttttgttactttcatgtagaggtgtgaacaaacggaatcaggatgaaattttcagggttttttaatggcaaacaatttttc

SEQ ID NO: 32868 - protein, 485 aa, Arabidopsis thaliana
  misc_feature (1)..(485): Ceres Seq. ID no. 13601357
MSTSSSFPRTIVSYTVTTSLFIVIFLCSVFFFTRRTLEPSLSPYHTADIPLPAVDLPPPTPLLPQIEPHDGDVTVETNPKEVEDSRRGGDDVAVETELKLKDVEDSHTEKTEEEEEGRGESPGEVSVESVEHAVIEKMRGCDLYKGSWVKGDDEYPLYQPGSCPYVDDAFDCQRNGRRDSDYLNWRWKPDGCDLPRFNATDFLVKLRGKSLMLVGDSMNRNQFESMLCVLREGLSDKSRMYEVHGHNITKGRGYFVFKFEDYNCTVEFVRSHFLVREGVRANAQGNTNPTLSIDRIDKSHAKWKRADILVFNTGHWWVHGKTARGKNYYKEGDYIYPKFDATEAYRRSLKTWAKWIDQNVNPKKQLVFYRGYSSAHFRGGEWDSGGSCNGEVEPVKKGSIIDSYPLKMKIVQEAIKEMQVPVILLNVTKLTNFRKDGHPSIYGKTNTDGKKVSTRRQDCSHWCLPGVPDVWNHLIYASLLLQPHS

SEQ ID NO: 32869 - protein, 348 aa, Arabidopsis thaliana
  misc_feature (1)..(348): Ceres Seq. ID no. 13601358
MRGCDLYKGSWVKGDDEYPLYQPGSCPYVDDAFDCQRNGRRDSDYLNWRWKPDGCDLPRFNATDFLVKLRGKSLMLVGDSMNRNQFESMLCVLREGLSDKSRMYEVHGHNITKGRGYFVFKFEDYNCTVEFVRSHFLVREGVRANAQGNTNPTLSIDRIDKSHAKWKRADILVFNTGHWWVHGKTARGKNYYKEGDYIYPKFDATEAYRRSLKTWAKWIDQNVNPKKQLVFYRGYSSAHFRGGEWDSGGSCNGEVEPVKKGSIIDSYPLKMKIVQEAIKEMQVPVILLNVTKLTNFRKDGHPSIYGKTNTDGKKVSTRRQDCSHWCLPGVPDVWNHLIYASLLLQPHS

SEQ ID NO: 32870 - protein, 274 aa, Arabidopsis thaliana
  misc_feature (1)..(274): Ceres Seq. ID no. 13601359
MLVGDSMNRNQFESMLCVLREGLSDKSRMYEVHGHNITKGRGYFVFKFEDYNCTVEFVRSHFLVREGVRANAQGNTNPTLSIDRIDKSHAKWKRADILVFNTGHWWVHGKTARGKNYYKEGDYIYPKFDATEAYRRSLKTWAKWIDQNVNPKKQLVFYRGYSSAHFRGGEWDSGGSCNGEVEPVKKGSIIDSYPLKMKIVQEAIKEMQVPVILLNVTKLTNFRKDGHPSIYGKTNTDGKKVSTRRQDCSHWCLPGVPDVWNHLIYASLLLQPHS

SEQ ID NO: 32871 - DNA, 781 bp, Arabidopsis thaliana
  misc_feature (1)..(781): Ceres Seq. ID no. 13601366
tttgcacacataaccctaatttggtctcttactctaacccgagagataatggctcctacacaaaatctcttccttgtcgctattgccttcgccgtcattttcaccgcctccaccgtacatggtcgtcataatggtgcagaagatatcgtgcattcctcctgcgaacacgcgagctatccatcactatgcgtccgtactctttcgtcatactccggtccaaccatcaccaaccgccgcgatctagctcaagccgccataaaaatcagcctctcccacgctcaaagcgccgcgaagaaactcgcggtggtgcgagactcggtggggaagaagaagcaagagaaagcggcgcttgtggactgtgtggagatgattggagactctgtggacgagctaagccgtacgctcggcgttttgaagcacctccgtgtctctggcggttcagctaaagagttccggtggcagatgagcaatgcacagacgtgggctagcgcggcacttacggatgacgacacgtgtctcgatgggtttcaagggatggacgacggtgaaatcaaaacggaggtgaagcagtggatgacgaaagtggccagggttacgagcaacgcgctttacatggtcaaccagctagatgagacacgtggcaaaccccacgacgtacatctttgatgttaatgcactagatcgttttaatggacggtctttattgtgtgtgttggtttttcgttcatgtgttttaagtgtgagattatctatcgctacgatatatagaaatgagtttttg

SEQ ID NO: 32872 - protein, 221 aa, Arabidopsis thaliana
  misc_feature (1)..(221): Ceres Seq. ID no. 13601367
FAHITLIWSLTLTREIMAPTQNLFLVAIAFAVIFTASTVHGRHNGAEDIVHSSCEHASYPSLCVRTLSSYSGPTITNRRDLAQAAIKISLSHAQSAAKKLAVVRDSVGKKKQEKAALVDCVEMIGDSVDELSRTLGVLKHLRVSGGSAKEFRWQMSNAQTWASAALTDDDTCLDGFQGMDDGEIKTEVKQWMTKVARVTSNALYMVNQLDETRGKPHDVHL

SEQ ID NO: 32873 - protein, 205 aa, Arabidopsis thaliana
  misc_feature (1)..(205): Ceres Seq. ID no. 13601368
MAPTQNLFLVAIAFAVIFTASTVHGRHNGAEDIVHSSCEHASYPSLCVRTLSSYSGPTITNRRDLAQAAIKISLSHAQSAAKKLAVVRDSVGKKKQEKAALVDCVEMIGDSVDELSRTLGVLKHLRVSGGSAKEFRWQMSNAQTWASAALTDDDTCLDGFQGMDDGEIKTEVKQWMTKVARVTSNALYMVNQLDETRGKPHDVHL

SEQ ID NO: 32874 - DNA, 1974 bp, Arabidopsis thaliana
  misc_feature (1)..(1974): Ceres Seq. ID no. 13601380
ctctcctctcattttctactcttcttcaaaagcacactcaatatttcgagatcctctcggcttgttcgttcttcgtgaacgatcccatctattgtttctcgctagtctcagattcgactaacttggatatctccgatactgaagaagcctccttcttctttttccgctcttcccgatgccgatcgataagatcttcaaagatgatgctagtgaagagaagggagaacgtgcgaggatggcatcatttgttggtgcaatggctatcagtgatctggttaagtctactttagggccaaagggcatggataaaatcttgcaatctactggtagaggtcatgcggtcactgttactaacgatggtgctactattctcaagtcacttcacatagacaaccctgcagctaaagttcttgttgacatctcgaaagttcaagatgatgaggttggtgatggaactacctctgttgttgtcttggccggcgagcttctgagggaagcagaaaagcttgtggcttctaagattcaccctatgaccatcatagcaggttacagaatggcttcggaatgtgctcgtaatgctttactgaaaagagtcattgataacaaggacaatgcagagaagtttaggtcagacttgttgaagattgcgatgactactttatgttccaaaattctctcacaggacaaggaacattttgcagaaatggccgtggatgctgttttcaggctaaagggaagcacaaacttggaagctattcagatcatcaaaaaacctggagggtctctgaaggattcgtttttggatgaagggtttattcttgacaagaaaataggaattgggcagcctaagcgcatagagaatgcaaatatcttagtagctaatactgctatggataccgataaagtgaagatttacggtgcacgtgtccgtgtggattccatgaccaaggttgctgagattgaaggggctgagaaggaaaaaatgaaagacaaggtgaagaagatcataggccacggaatcaactgctttgttaacaggcagttgatctacaatttccctgaggaactctttgctgatgctggtatacttgctattgagcatgctgactttgagggaatagagcgtcttggtttggttactggtggtgaaattgcttcgacctttgacaacccagagtctgttaagcttgggcattgcaagcttatagaagaaatcatgattggtgaagacaagttgattcatttctctggttgtgaaatgggccaggcttgttcaattgtcctaagaggggccagtcaccatgtcctagatgaggctgaaagatcactccatgatgccttatgtgtactctctcaaacagtgaatgatactagagttttgcttggaggtggatggccagagatggtgatggcaaaggaagtagatgagcttgcaaggaaaactgctggcaaaaaatctcatgccattgaagctttctcacgtgctctagttgctataccgacaacaatcgctgacaacgctggtttagacagtgccgaattggttgctcagcttcgtgcagagcaccacactgaagggtgtaacgctgggatcgacgtcatcactggagctgtaggagatatggaagagagaggaatctatgaagcattcaaagtgaagcaagcggttctgctttcagccacagaagcatctgagatgatattgcgagtggatgaaatcattacatgtgctcctaggaggagagaagacaggatgtgaaaaactcaacacaaacacatgaacgtggtgggagcctagagattccatgattgtgttttcgatttggatcagaatacaacttttctaatatgtttaatgttttgctcctccttagaactcatctttttgttttgtttccttttaatcttgttttgagtttgaatttagacgtttgaaaaaagtgttagctccaaagtttttaatttgtttggttg

SEQ ID NO: 32875 - protein, 527 aa, Arabidopsis thaliana
  misc_feature (1)..(527): Ceres Seq. ID no. 13601381
MPIDKIFKDDASEEKGERARMASFVGAMAISDLVKSTLGPKGMDKILQSTGRGHAVTVTNDGATILKSLHIDNPAAKVLVDISKVQDDEVGDGTTSVVVLAGELLREAEKLVASKIHPMTIIAGYRMASECARNALLKRVIDNKDNAEKFRSDLLKIAMTTLCSKILSQDKEHFAEMAVDAVFRLKGSTNLEAIQIIKKPGGSLKDSFLDEGFILDKKIGIGQPKRIENANILVANTAMDTDKVKIYGARVRVDSMTKVAEIEGAEKEKMKDKVKKIIGHGINCFVNRQLIYNFPEELFADAGILAIEHADFEGIERLGLVTGGEIASTFDNPESVKLGHCKLIEEIMIGEDKLIHFSGCEMGQACSIVLRGASHHVLDEAERSLHDALCVLSQTVNDTRVLLGGGWPEMVMAKEVDELARKTAGKKSHAIEAFSRALVAIPTTIADNAGLDSAELVAQLRAEHHTEGCNAGIDVITGAVGDMEERGIYEAFKVKQAVLLSATEASEMILRVDEIITCAPRRREDRM

SEQ ID NO: 32876 - protein, 507 aa, Arabidopsis thaliana
  misc_feature (1)..(507): Ceres Seq. ID no. 13601382
MASFVGAMAISDLVKSTLGPKGMDKILQSTGRGHAVTVTNDGATILKSLHIDNPAAKVLVDISKVQDDEVGDGTTSVVVLAGELLREAEKLVASKIHPMTIIAGYRMASECARNALLKRVIDNKDNAEKFRSDLLKIAMTTLCSKILSQDKEHFAEMAVDAVFRLKGSTNLEAIQIIKKPGGSLKDSFLDEGFILDKKIGIGQPKRIENANILVANTAMDTDKVKIYGARVRVDSMTKVAEIEGAEKEKMKDKVKKIIGHGINCFVNRQLIYNFPEELFADAGILAIEHADFEGIERLGLVTGGEIASTFDNPESVKLGHCKLIEEIMIGEDKLIHFSGCEMGQACSIVLRGASHHVLDEAERSLHDALCVLSQTVNDTRVLLGGGWPEMVMAKEVDELARKTAGKKSHAIEAFSRALVAIPTTIADNAGLDSAELVAQLRAEHHTEGCNAGIDVITGAVGDMEERGIYEAFKVKQAVLLSATEASEMILRVDEIITCAPRRREDRM

SEQ ID NO: 32877 - protein, 500 aa, Arabidopsis thaliana
  misc_feature (1)..(500): Ceres Seq. ID no. 13601383
MAISDLVKSTLGPKGMDKILQSTGRGHAVTVTNDGATILKSLHIDNPAAKVLVDISKVQDDEVGDGTTSVVVLAGELLREAEKLVASKIHPMTIIAGYRMASECARNALLKRVIDNKDNAEKFRSDLLKIAMTTLCSKILSQDKEHFAEMAVDAVFRLKGSTNLEAIQIIKKPGGSLKDSFLDEGFILDKKIGIGQPKRIENANILVANTAMDTDKVKIYGARVRVDSMTKVAEIEGAEKEKMKDKVKKIIGHGINCFVNRQLIYNFPEELFADAGILAIEHADFEGIERLGLVTGGEIASTFDNPESVKLGHCKLIEEIMIGEDKLIHFSGCEMGQACSIVLRGASHHVLDEAERSLHDALCVLSQTVNDTRVLLGGGWPEMVMAKEVDELARKTAGKKSHAIEAFSRALVAIPTTIADNAGLDSAELVAQLRAEHHTEGCNAGIDVITGAVGDMEERGIYEAFKVKQAVLLSATEASEMILRVDEIITCAPRRREDRM

SEQ ID NO: 32878 - DNA, 1774 bp, Arabidopsis thaliana
  misc_feature (1)..(1774): Ceres Seq. ID no. 13601391
gattttctagagatttgtgacaaatgtcaaatgggttgttgaatcttcacgtgtcctcttttctcctcttatctcatctaatttgtttctttagttttgttcaactcaagcacatccgagaaagtcatagtctttgaacatcaaattgccttttgtttgtcaaatgacttaagttcttgatctttttcttgtagggtttttttctctgcactccacggtcatggcttcgtctacggctcagagcaagaagcagtttaagaggtctatgactaagaaatcacattcatggtggtgggatagtcacaattgtcccaagaactcaaaatggcttgcagagaatctagaaaagatggatgatcgagtgaaccacatgttaaaactgattgaagaagacgcagactcttttgcaaagaaagctcagatgtattttcagaaacgtcccgagttaatccagcttgtcgaggaattctaccgcatgtatcgcgcattggctgagcgttatgatcaagctagtggtgaacttcagaagaaccatacatctgagatccagtcacagagctctcttgagatatcatctcctaccaaagagaagttgagtcgccgtcaatctagccataaagaagaggaagattcatcgtctttgacagattctggttctgattctgatcattcctctgccaatgatgaagacggtgacgaggcattgatccgtagaatggctgaacttgagcttgagcttcaagagacgaaacagaagctccttctccagcaggaaagtgttgatggtgacaacaatgttgatctccttcacaaaattactacatatgagggagagcttaaagaagctaatgagaagatgcgaatgcacgaagacgagattgctaatctgaagaatcagcttcagagcttcatgtcttttgacacagaggatcatcttggtgctgaacaaaagagtgttgatttggataaagaggacactaaagaagatgcagtagctacaaaagtgctagccttggaggaagagctgagtatcgcgaaagagaagcttcagcactttgagaaagagacttattctctgaaaaatgagctcgagatcggcaaagccgctgaggagaagctgaagagcttacaacatgagctcgagttggctcagagagacgctgatacctacataaacaagctcaacgcagagaagaaagaagtcttgaagttgcaggagagattggcaatggtgaaaactagtttacaggatagagataacgagataagggcattgaaaactgcggtttcagacgctgaacagaagatattccccgaaaaagcacagatcaagggagaaatgtcgaagatgcttgaagaacgaagccaacttggagagcaactgagagagctggaatcacatataaggctgatcaaggaagagaaagctgaaacagaggagaagcttagaggaggaactgagaaaatcagcggaatgagagacgagagcaatgtgctaagagaagagattgggaagagagaagagaagataaaggaaacggaaaagcatatggaggagcttcacatggagcaagtgaggctgagaagacggtcaagtgagcttacggaagaagtggaaaggacgagagtgtctgcatcggaaatggctgagcagaaaagagaagctataagacagctttgtatgtctcttgaccattacagagatgggtacgacagactttggagagttgttgcaggacataagagtaagagagtagtggtcttatcaacttga

SEQ ID NO: 32879 - protein, 517 aa, Arabidopsis thaliana
  misc_feature (1)..(517): Ceres Seq. ID no. 13601392
MASSTAQSKKQFKRSMTKKSHSWWWDSHNCPKNSKWLAENLEKMDDRVNHMLKLIEEDADSFAKKAQMYFQKRPELIQLVEEFYRMYRALAERYDQASGELQKNHTSEIQSQSSLEISSPTKEKLSRRQSSHKEEEDSSSLTDSGSDSDHSSANDEDGDEALIRRMAELELELQETKQKLLLQQESVDGDNNVDLLHKITTYEGELKEANEKMRMHEDEIANLKNQLQSFMSFDTEDHLGAEQKSVDLDKEDTKEDAVATKVLALEEELSIAKEKLQHFEKETYSLKNELEIGKAAEEKLKSLQHELELAQRDADTYINKLNAEKKEVLKLQERLAMVKTSLQDRDNEIRALKTAVSDAEQKIFPEKAQIKGEMSKMLEERSQLGEQLRELESHIRLIKEEKAETEEKLRGGTEKISGMRDESNVLREEIGKREEKIKETEKHMEELHMEQVRLRRRSSELTEEVERTRVSASEMAEQKREAIRQLCMSLDHYRDGYDRLWRVVAGHKSKRVVVLST

SEQ ID NO: 32880 - protein, 502 aa, Arabidopsis thaliana; identical to SEQ ID NO: 28278
  misc_feature (1)..(502): Ceres Seq. ID no. 13601393

SEQ ID NO: 32881 - protein, 474 aa, Arabidopsis thaliana; identical to SEQ ID NO: 28279
  misc_feature (1)..(474): Ceres Seq. ID no. 13601394

SEQ ID NO: 32882 - DNA, 878 bp, Arabidopsis thaliana
  misc_feature (1)..(878): Ceres Seq. ID no. 13601399
cactcaacaaagcttaaccataaactgtgagtaaaaaagagaagaaagaaaaatggtgctaaaggtgtacggacctcactttgcttcaccaaagagagctttggtcacactgatcgagaagggcgttgccttcgagaccatccccgtcgatctcatgaaaggagaacacaagcagcctgcttatctcgctctacagccttttggtactgttcctgctgttgttgacggtgactacaaaatcttcgagtcccgtgcggtgatgaggtacgtagctgagaagtacaggtcacaaggacctgatcttttggggaaaaccgttgaagacagaggtcaagttgaacaatggcttgatgtggaagcgaccacttaccacccaccgctattgaacttaacgcttcacataatgttcgcatcagtcatgggattcccatctgatgagaagctgatcaaggagagtgaagagaagcttgcgggtgttcttgatgtctacgaggcacatctctcaaagagcaagtacttggccggtgacttcgtgagcttggctgatttggctcacctcccgttcactgattacttggttggtccgattgggaaagcttacatgatcaaagataggaaacacgtgagcgcgtggtgggatgatattagcagccgtcctgcgtggaaggagactgttgccaagtattcattcccagcttaagatgtgttcatcttcttggtgatgtggtttgtgttttatgagaggtttaataaaagtggaactaaatgtacctcttaatgtaatgttgccacctctgtgttctctttccttttgtagtttaataagtatctttatggctttgtgaggctttcaattttaaggaaatgatcttttcccc

SEQ ID NO: 32883 - protein, 215 aa, Arabidopsis thaliana
  misc_feature (1)..(215): Ceres Seq. ID no. 13601400
MVLKVYGPHFASPKRALVTLIEKGVAFETIPVDLMKGEHKQPAYLALQPFGTVPAVVDGDYKIFESRAVMRYVAEKYRSQGPDLLGKTVEDRGQVEQWLDVEATTYHPPLLNLTLHIMFASVMGFPSDEKLIKESEEKLAGVLDVYEAHLSKSKYLAGDFVSLADLAHLPFTDYLVGPIGKAYMIKDRKHVSAWWDDISSRPAWKETVAKYSFPA

SEQ ID NO: 32884 - protein, 181 aa, Arabidopsis thaliana
  misc_feature (1)..(181): Ceres Seq. ID no. 13601401
MKGEHKQPAYLALQPFGTVPAVVDGDYKIFESRAVMRYVAEKYRSQGPDLLGKTVEDRGQVEQWLDVEATTYHPPLLNLTLHIMFASVMGFPSDEKLIKESEEKLAGVLDVYEAHLSKSKYLAGDFVSLADLAHLPFTDYLVGPIGKAYMIKDRKHVSAWWDDISSRPAWKETVAKYSFPA

SEQ ID NO: 32885 - protein, 146 aa, Arabidopsis thaliana
  misc_feature (1)..(146): Ceres Seq. ID no. 13601402
MRYVAEKYRSQGPDLLGKTVEDRGQVEQWLDVEATTYHPPLLNLTLHIMFASVMGFPSDEKLIKESEEKLAGVLDVYEAHLSKSKYLAGDFVSLADLAHLPFTDYLVGPIGKAYMIKDRKHVSAWWDDISSRPAWKETVAKYSFPA

SEQ ID NO: 32886 - DNA, 1182 bp, Arabidopsis thaliana
  misc_feature (1)..(1182): Ceres Seq. ID no. 13601410
atcattcatcatcatcagacatcaggtgcgtcataagctccacaaaaaactcatccatggcgattcttagttacatctcagcaacatcaaccacaccaccaattcctcaagatcaatctcccaattctcgtctaccaaccaaaatcattctacccaataagaaacctgagaaatggtccaccggagttgctcccggagagtacggtggtcctccgactaccaccaagctccgaaagtactggggaggtgaaaaagaagatcccattacttccacagacttaatctggaacagagattttatggatcaaatgaagaaattgtttgatgatcctaatgattcttctctcgacccatctccttcaaaggaaaagtcttctgggtttctgagctttagcagagttatgagtcttgacagtatggatgttgatttaagtaaagagcttgcatcgtcttctaaatccgttgtgaaaaatcgtcttgacacctccaagtcagaagctaaaaagcaaatgagtaaggctattgtgtctcctaaatggaagctggcacctacacgtcgtgagcaagagaaatgggatagagcaacgaaggctgcaactggtggcagtgatgtgatgtttagggagctgagacggccacgtggtgacccagaagtacaagctgctaaagacagggaacaatattttaagctgaaaaataagattcaggttctcacactcggtattggtggtgttggtttagtctcagcttatatctcatacaccccagagatagcacttagttttggtgctggcttgttgggttcacttgcatatatgaggatgcttggtaactctgtagatgccatggcagatggagccagaggagttgccaaaggtgcagctaaccagccacggttactagtccccgttgtgttggttatgatattcaatagatggaacgcaatacttgttcctgagtatggattcatgcatttggagttgataccaatgttggttgggttctttacttacaaaattgctacgttctttcaagctatagaagaagccatctccattactactcaaaaacccgaatcaatctctccagacacacaggccagtgattaataaggtcaaggtcagtgttgtaagaaatgtaattaaacacagaagtgttaatgtaataaaaactaataactca

SEQ ID NO: 32887 - protein, 368 aa, Arabidopsis thaliana
  misc_feature (1)..(368): Ceres Seq. ID no. 13601411
HSSSSDIRCVISSTKNSSMAILSYISATSTTPPIPQDQSPNSRLPTKIILPNKKPEKWSTGVAPGEYGGPPTTTKLRKYWGGEKEDPITSTDLIWNRDFMDQMKKLFDDPNDSSLDPSPSKEKSSGFLSFSRVMSLDSMDVDLSKELASSSKSVVKNRLDTSKSEAKKQMSKAIVSPKWKLAPTRREQEKWDRATKAATGGSDVMFRELRRPRGDPEVQAAKDREQYFKLKNKIQVLTLGIGGVGLVSAYISYTPEIALSFGAGLLGSLAYMRMLGNSVDAMADGARGVAKGAANQPRLLVPVVLVMIFNRWNAILVPEYGFMHLELIPMLVGFFTYKIATFFQAIEEAISITTQKPESISPDTQASD

SEQ ID NO: 32888 - protein, 350 aa, Arabidopsis thaliana
  misc_feature (1)..(350): Ceres Seq. ID no. 13601412
MAILSYISATSTTPPIPQDQSPNSRLPTKIILPNKKPEKWSTGVAPGEYGGPPTTTKLRKYWGGEKEDPITSTDLIWNRDFMDQMKKLFDDPNDSSLDPSPSKEKSSGFLSFSRVMSLDSMDVDLSKELASSSKSVVKNRLDTSKSEAKKQMSKAIVSPKWKLAPTRREQEKWDRATKAATGGSDVMFRELRRPRGDPEVQAAKDREQYFKLKNKIQVLTLGIGGVGLVSAYISYTPEIALSFGAGLLGSLAYMRMLGNSVDAMADGARGVAKGAANQPRLLVPVVLVMIFNRWNAILVPEYGFMHLELIPMLVGFFTYKIATFFQAIEEAISITTQKPESISPDTQASD

SEQ ID NO: 32889 - protein, 269 aa, Arabidopsis thaliana
  misc_feature (1)..(269): Ceres Seq. ID no. 13601413
MDQMKKLFDDPNDSSLDPSPSKEKSSGFLSFSRVMSLDSMDVDLSKELASSSKSVVKNRLDTSKSEAKKQMSKAIVSPKWKLAPTRREQEKWDRATKAATGGSDVMFRELRRPRGDPEVQAAKDREQYFKLKNKIQVLTLGIGGVGLVSAYISYTPEIALSFGAGLLGSLAYMRMLGNSVDAMADGARGVAKGAANQPRLLVPVVLVMIFNRWNAILVPEYGFMHLELIPMLVGFFTYKIATFFQAIEEAISITTQKPESISPDTQASD

SEQ ID NO: 32890 - DNA, 1237 bp, Arabidopsis thaliana
  misc_feature (1)..(1237): Ceres Seq. ID no. 13601414
cttggcgaccttaaatacaaaatgggactctgtttccaactcaacttagcctctctgtctctcatactcttctcttcattccctggacttttagcacaatctcaacaacatttcttgggacaaaacaacacaagcttgttgagtggagggagatgcaatttggctagaggcaaatgggtctatgattcttcatatcctctctatagtgcttttagttgtcccttcatcgattccgaattcaactgccagaaagcgggtcgtccggacactaactatcaacacttccgttggcagcctttctcctgtcctctccctagattcgatggggcgaattttatgaggagaatgagagggaagaagataatgatggtaggtgactcactgagtcttaacatgttcgaatcgttggcctgcttgcttcatgcttctctccctaatgctaagtactctcttcgtcgaagccaacctctcacttccctcactttccaggattatggagtgacgataaatttgtatagaacacagtttctagtagatgtggttcaagaaaaggcaggacgagtgcttgtgcttgactccatcaaacaagccgatgcttggcttggcatggatgttcttatcttcaactcgtggcactggtggactcacacctccggacttcagccctgggattatatgagggaaggaaaccaattgtacaaagacatgaacaggcttgtggcttattacaaaggacttaacacatgggctcgttggattaacaataacattgtcccttcacgtactcaagtcttctttcaaggtgtttctcctgtccactatgacggaagagagtggaacgaaccattgaagtcgtgcaatggtcaaactcagccgttcatgggacaaagatatccaggaggattgcccttaggttgggttgtggttaacaaagtgttgagccgaattagaaaaccggtccatcttctcgatctcactactctctcggagtatcgcaaagacgcacatccaagtctctacaatggtatctcaaaggatctagactgtagccattggtgcctccctggactccctgatacttggaacttacttctctactcatctcttacttcctagtccttgttttacatatttgtttgtttctaccattttataaatagtttgtgatgatcctgtgtgattgtgattgatatttttccttcgttaatttaatcttaaatgtaattaacattgttac

SEQ ID NO: 32891 - protein, 371 aa, Arabidopsis thaliana
  misc_feature (1)..(371): Ceres Seq. ID no. 13601415
LGDLKYKMGLCFQLNLASLSLILFSSFPGLLAQSQQHFLGQNNTSLLSGGRCNLARGKWVYDSSYPLYSAFSCPFIDSEFNCQKAGRPDTNYQHFRWQPFSCPLPRFDGANFMRRMRGKKIMMVGDSLSLNMFESLACLLHASLPNAKYSLRRSQPLTSLTFQDYGVTINLYRTQFLVDVVQEKAGRVLVLDSIKQADAWLGMDVLIFNSWHWWTHTSGLQPWDYMREGNQLYKDMNRLVAYYKGLNTWARWINNNIVPSRTQVFFQGVSPVHYDGREWNEPLKSCNGQTQPFMGQRYPGGLPLGWVVVNKVLSRIRKPVHLLDLTTLSEYRKDAHPSLYNGISKDLDCSHWCLPGLPDTWNLLLYSSLTS

SEQ ID NO: 32892 - protein, 364 aa, Arabidopsis thaliana
  misc_feature (1)..(364): Ceres Seq. ID no. 13601416
MGLCFQLNLASLSLILFSSFPGLLAQSQQHFLGQNNTSLLSGGRCNLARGKWVYDSSYPLYSAFSCPFIDSEFNCQKAGRPDTNYQHFRWQPFSCPLPRFDGANFMRRMRGKKIMMVGDSLSLNMFESLACLLHASLPNAKYSLRRSQPLTSLTFQDYGVTINLYRTQFLVDVVQEKAGRVLVLDSIKQADAWLGMDVLIFNSWHWWTHTSGLQPWDYMREGNQLYKDMNRLVAYYKGLNTWARWINNNIVPSRTQVFFQGVSPVHYDGREWNEPLKSCNGQTQPFMGQRYPGGLPLGWVVVNKVLSRIRKPVHLLDLTTLSEYRKDAHPSLYNGISKDLDCSHWCLPGLPDTWNLLLYSSLTS

SEQ ID NO: 32893 - protein, 259 aa, Arabidopsis thaliana
  misc_feature (1)..(259): Ceres Seq. ID no. 13601417
MRRMRGKKIMMVGDSLSLNMFESLACLLHASLPNAKYSLRRSQPLTSLTFQDYGVTINLYRTQFLVDVVQEKAGRVLVLDSIKQADAWLGMDVLIFNSWHWWTHTSGLQPWDYMREGNQLYKDMNRLVAYYKGLNTWARWINNNIVPSRTQVFFQGVSPVHYDGREWNEPLKSCNGQTQPFMGQRYPGGLPLGWVVVNKVLSRIRKPVHLLDLTTLSEYRKDAHPSLYNGISKDLDCSHWCLPGLPDTWNLLLYSSLTS

SEQ ID NO: 32894 - DNA, 2216 bp, Arabidopsis thaliana
  misc_feature (1)..(2216): Ceres Seq. ID no. 13601436
acaaccgattaacaaatagaaaacgaagcacaaaagatatcagaagaagagagaagtctcctcccaaaaaaaccaaaaaaaaaaaaaaaaaagagaaagaaaagaactcgagtgcaaaaagcttctctcttccttcccatggggtgcatttgaactaatctcctccttgaaatcgcttgattgattgttataaatcgattaatcgattcaaaccgttggatattattccaaaacaacccaaaaagagaatcccatgggaagttgtgtttcgtcgccattgaaaggctctccttttggaaagagaccggtaagaaggcgacacagtagtaatagcagaacatcctctgttcctcgtttcgattcttcaactaatctttcccggagattgattttccagccaccaagccgcgttctccccgagcctatcggtgatggaattcacctcaagtatgatttgggaaaagaactaggccgtggtgaatttggtgtcactcatgaatgtatcgagatcagtacccgagaaagatttgcgtgtaagaggatatcgaaggagaagctaaggacggagatagatgtggaggatgtgagaagagaggttgagatcatgagatgtttaccaaaacatcctaatattgttagctttaaggaagcttttgaggacaaagacgctgtctatcttgtcatggagatttgtgaaggaggtgaactttttgaccgcattgtctctagagggcattacactgaacgcgccgctgcatctgttgctaaaaccattcttgaagttgtcaaggtgtgtcatgaacatggagtgattcatcgtgatcttaaaccagagaacttcctcttttcgaatggaactgagactgcacaactcaaagccattgattttggtctctccattttcttcaaaccggcccagcggttcaatgagattgtgggaagtccttactacatggctccagaggttttgagacgaaattacggtcctgagatcgatgtttggagtgctggtgttatactctatatcttgctttgtggtgttcctcccttttgggcagaaaccgaggaaggaatcgcgcacgctattgtgagagggaacatcgatttcgagagagatccatggccaaaagtctcacatgaagccaaggaactcgttaagaacatgcttgatgcaaatccttatagcagactcacagtccaagaagtgcttgaacatccatggatccggaacgcagagagagcaccaaatgtgaatcttggagataacgtcaggaccaagattcaacaattcttgttgatgaacaggttcaagaagaaagtcctcaggattgtagcggacaatctaccaaacgaggagatagcagcgatagtacagatgtttcaaacaatggacactgataagaatggtcacttgacttttgaggagctaagagatggactgaagaagattggacaagttgttcccgatggcgatgtgaagatgctaatggatgcagcggatacagatggaaatgggatgttgagctgtgatgagtttgtgacactctcaatacatttgaagagaatgggatgtgatgagcatttgcaggaagcattcaagtattttgacaagaacgggaacggatttatcgagctagatgagctcaaggtagctctttgcgatgataagctaggccacgctaacggtaacgaccagtggatcaaagatatcttctttgacgtcgacctcaacaaggatggacggataagctttgatgagtttaaggcaatgatgaaatcagggacggattggaaaatggcgtcgaggcagtactcgagggcgttgttgaatgctctaagcatcaagatgttcaaagaagattttggggacaatggtcctaagtcacattccatggagttccctatagcaaggaagagggctaagctgcttgatgctcccaagaacaaatcaatggagcttcagatctccaaaacctataaaccctcaggtctaagaaactaaagaagagaaaaaatgaacaagcaaaagactctttgattctttttaatgtgtttgtttttggtgctacaagtgcaaaaagtgtgatttaatgggcttaactctgcgttgttcatctttttccttaaaggtcgttaaacacattcatttaatttattaagttgtagcattaagaatggcgtcacatgtagtgtaaagttttccaagctgtgcaaac

SEQ ID NO: 32895 - protein, 582 aa, Arabidopsis thaliana
  misc_feature (1)..(582): Ceres Seq. ID no. 13601437
MGSCVSSPLKGSPFGKRPVRRRHSSNSRTSSVPRFDSSTNLSRRLIFQPPSRVLPEPIGDGIHLKYDLGKELGRGEFGVTHECIEISTRERFACKRISKEKLRTEIDVEDVRREVEIMRCLPKHPNIVSFKEAFEDKDAVYLVMEICEGGELFDRIVSRGHYTERAAASVAKTILEVVKVCHEHGVIHRDLKPENFLFSNGTETAQLKAIDFGLSIFFKPAQRFNEIVGSPYYMAPEVLRRNYGPEIDVWSAGVILYILLCGVPPFWAETEEGIAHAIVRGNIDFERDPWPKVSHEAKELVKNMLDANPYSRLTVQEVLEHPWIRNAERAPNVNLGDNVRTKIQQFLLMNRFKKKVLRIVADNLPNEEIAAIVQMFQTMDTDKNGHLTFEELRDGLKKIGQVVPDGDVKMLMDAADTDGNGMLSCDEFVTLSIHLKRMGCDEHLQEAFKYFDKNGNGFIELDELKVALCDDKLGHANGNDQWIKDIFFDVDLNKDGRISFDEFKAMMKSGTDWKMASRQYSRALLNALSIKMFKEDFGDNGPKSHSMEFPIARKRAKLLDAPKNKSMELQISKTYKPSGLRN

SEQ ID NO: 32896 - protein, 465 aa, Arabidopsis thaliana
  misc_feature (1)..(465): Ceres Seq. ID no. 13601438
MRCLPKHPNIVSFKEAFEDKDAVYLVMEICEGGELFDRIVSRGHYTERAAASVAKTILEVVKVCHEHGVIHRDLKPENFLFSNGTETAQLKAIDFGLSIFFKPAQRFNEIVGSPYYMAPEVLRRNYGPEIDVWSAGVILYILLCGVPPFWAETEEGIAHAIVRGNIDFERDPWPKVSHEAKELVKNMLDANPYSRLTVQEVLEHPWIRNAERAPNVNLGDNVRTKIQQFLLMNRFKKKVLRIVADNLPNEEIAAIVQMFQTMDTDKNGHLTFEELRDGLKKIGQVVPDGDVKMLMDAADTDGNGMLSCDEFVTLSIHLKRMGCDEHLQEAFKYFDKNGNGFIELDELKVALCDDKLGHANGNDQWIKDIFFDVDLNKDGRISFDEFKAMMKSGTDWKMASRQYSRALLNALSIKMFKEDFGDNGPKSHSMEFPIARKRAKLLDAPKNKSMELQISKTYKPSGLRN

SEQ ID NO: 32897 - protein, 439 aa, Arabidopsis thaliana
  misc_feature (1)..(439): Ceres Seq. ID no. 13601439
MEICEGGELFDRIVSRGHYTERAAASVAKTILEVVKVCHEHGVIHRDLKPENFLFSNGTETAQLKAIDFGLSIFFKPAQRFNEIVGSPYYMAPEVLRRNYGPEIDVWSAGVILYILLCGVPPFWAETEEGIAHAIVRGNIDFERDPWPKVSHEAKELVKNMLDANPYSRLTVQEVLEHPWIRNAERAPNVNLGDNVRTKIQQFLLMNRFKKKVLRIVADNLPNEEIAAIVQMFQTMDTDKNGHLTFEELRDGLKKIGQVVPDGDVKMLMDAADTDGNGMLSCDEFVTLSIHLKRMGCDEHLQEAFKYFDKNGNGFIELDELKVALCDDKLGHANGNDQWIKDIFFDVDLNKDGRISFDEFKAMMKSGTDWKMASRQYSRALLNALSIKMFKEDFGDNGPKSHSMEFPIARKRAKLLDAPKNKSMELQISKTYKPSGLRN

SEQ ID NO: 32898 - DNA, 1199 bp, Arabidopsis thaliana
  misc_feature (1)..(1199): Ceres Seq. ID no. 13601440
aaatccaccaaaaacaaaaaatgtcgacttctaaagccataaccttaactctcttcattgcaacaacattactagcgccctgcaacgcagccgcaaacgcaacaacgaagccgctcttcccagcgattctaatcttcggtgattcaaccgtcgatacaggaaacaacaactaccctttaccaacaatcttcagagctgaacactttccttacggcatggatcttccagacggaaaagctaacggaagattctcaaacggaaaacttatctccgacataatcgcaaccaaactcaacatcaaagagtttattcctcctttcttacaaccaaatctctccgaccaagacattctaaccggagtctgtttcgcatcagctggtgccggttacgacgacctgaccagtctctcgacacaagccattcgtgtctcggaacaaccaaacatgttcaagagttacattgctcgtctcaaaggtatcgtgggagacaagaaagcgatggagatcataaacaatgccttcgtggttgtgagtgcagggcctaacgatttcattttgaactattacgaaattccctcaaggcgtctcgagtatcctttcatttctggttaccaagactttattcttaagaggcttgaaaatttcgtgcgggagctttacagtttaggtgtccggaatgttttggttggaggtttaccgccaatggggtgtttaccgatccatatgactgctaaattccgcaacatttttagattctgcttggaacaccataacaaagactctgttttatacaatgagaaacttcagaatctcttgccccaaatcgaagcatctcttccaggaagcaaattcctttacgccgatgtctataatcctatgatggagatgatccaaaaccctagcaaatacgggttcaaagagacgaagagaggatgttgtggaacagggttcctggagacgagcttcatgtgtaatgttttttctcctgtgtgtcaaaatcggtcggagtttttgttctttgactcgattcatccatcggaagctacctataatgtcataggcaatcttctggatcctctaattcgtggaaagttccaggcttaagtcatcacgagttgcaaaactgacacaattaattttcttgtttctttaatgcgactagttgtggactttcgtttatgaatcaaatgtaactttggc

SEQ ID NO: 32899 - protein, 366 aa, Arabidopsis thaliana
  misc_feature (1)..(366): Ceres Seq. ID no. 13601441
IHQKQKMSTSKAITLTLFIATTLLAPCNAAANATTKPLFPAILIFGDSTVDTGNNNYPLPTIFRAEHFPYGMDLPDGKANGRFSNGKLISDIIATKLNIKEFIPPFLQPNLSDQDILTGVCFASAGAGYDDLTSLSTQAIRVSEQPNMFKSYIARLKGIVGDKKAMEIINNAFVVVSAGPNDFILNYYEIPSRRLEYPFISGYQDFILKRLENFVRELYSLGVRNVLVGGLPPMGCLPIHMTAKFRNIFRFCLEHHNKDSVLYNEKLQNLLPQIEASLPGSKFLYADVYNPMMEMIQNPSKYGFKETKRGCCGTGFLETSFMCNVFSPVCQNRSEFLFFDSIHPSEATYNVIGNLLDPLIRGKFQA

SEQ ID NO: 32900 - protein, 360 aa, Arabidopsis thaliana
  misc_feature (1)..(360): Ceres Seq. ID no. 13601442
MSTSKAITLTLFIATTLLAPCNAAANATTKPLFPAILIFGDSTVDTGNNNYPLPTIFRAEHFPYGMDLPDGKANGRFSNGKLISDIIATKLNIKEFIPPFLQPNLSDQDILTGVCFASAGAGYDDLTSLSTQAIRVSEQPNMFKSYIARLKGIVGDKKAMEIINNAFVVVSAGPNDFILNYYEIPSRRLEYPFISGYQDFILKRLENFVRELYSLGVRNVLVGGLPPMGCLPIHMTAKFRNIFRFCLEHHNKDSVLYNEKLQNLLPQIEASLPGSKFLYADVYNPMMEMIQNPSKYGFKETKRGCCGTGFLETSFMCNVFSPVCQNRSEFLFFDSIHPSEATYNVIGNLLDPLIRGKFQA

SEQ ID NO: 32901 - protein, 295 aa, Arabidopsis thaliana
  misc_feature (1)..(295): Ceres Seq. ID no. 13601443
MDLPDGKANGRFSNGKLISDIIATKLNIKEFIPPFLQPNLSDQDILTGVCFASAGAGYDDLTSLSTQAIRVSEQPNMFKSYIARLKGIVGDKKAMEIINNAFVVVSAGPNDFILNYYEIPSRRLEYPFISGYQDFILKRLENFVRELYSLGVRNVLVGGLPPMGCLPIHMTAKFRNIFRFCLEHHNKDSVLYNEKLQNLLPQIEASLPGSKFLYADVYNPMMEMIQNPSKYGFKETKRGCCGTGFLETSFMCNVFSPVCQNRSEFLFFDSIHPSEATYNVIGNLLDPLIRGKFQA

SEQ ID NO: 32902 - DNA, 611 bp, Arabidopsis thaliana
  misc_feature (1)..(611): Ceres Seq. ID no. 13601448
agctaaaaccctaaagccctaaaatcaaaattacgctaaacagagaaggcgacaatggatcacatcgctgcggcggaagagcaaatcgtatcggagagacttcgaagaaagcttgaagaagttaatgtagctgctcagactcagctttctcctatccaagatcacatcaatttcacccttcagcaagcttatttcaaatgtgcatatgagtgctttgatagaagaagaaagcaagaggagataagtaactgcgtcgagcactgcagtgttcccgttgtcaaatctcaacagtatttcgagaacgaaatggctcaatttcaggaaagattgaacagatcactggtggtgtgtcaagacaagtttgaggcctcaaagctccagaagataaggcctgaagcggttaacgagatggagagttgtgtgcacaaatccattgaggaaaatctcaatacattaccacatattgtgcagagaatgaagacagcatttaacataaccaactaaaagctctcgtgaaaaaccttggattccagaacttgactagccatattgtttgaaaagaccttttcttttgtcttaatatgatctacaaatttgttttcctttttctt

SEQ ID NO: 32903 - protein, 149 aa, Arabidopsis thaliana
  misc_feature (1)..(149): Ceres Seq. ID no. 13601449
MDHIAAAEEQIVSERLRRKLEEVNVAAQTQLSPIQDHINFTLQQAYFKCAYECFDRRRKQEEISNCVEHCSVPVVKSQQYFENEMAQFQERLNRSLVVCQDKFEASKLQKIRPEAVNEMESCVHKSIEENLNTLPHIVQRMKTAFNITN

SEQ ID NO: 32904 - DNA, 1602 bp, Arabidopsis thaliana
  misc_feature (1)..(1602): Ceres Seq. ID no. 13601450
atatatccgataaatacttccgtcataacagagtaagagtttgtatgtaacaaatttcaacaaaaagaagagaaaaacaatgggagagaaagcgaaagcaaatgtgttagtcttctcatttccgatacaaggtcacataaaccctctcctccaattctcaaaacgcctactctctaaaaacgtcaacgtcacattcctcaccacttcctccacccacaactccatcctccgccgtgccatcaccggcggagccactgctcttcctctctcttttgtccccattgacgatggattcgaggaagatcacccatctacggacacatctcccgactacttcgcaaagttccaagaaaacgtatctcgaagcctctcagagcttatctcctcgatggacccaaaaccaaacgccgtcgtttacgactcgtgcctgccttatgtcctcgacgtttgccggaaacatcctggcgttgctgcggcgtcgtttttcactcagtcctccaccgtgaacgcgacctatattcatttcttgcgtggagagtttaaggagtttcaaaatgatgtcgttttgcctgcaatgcctccgctgaagggtaatgacttaccggtgtttctgtacgataacaatctctgccggccgttgtttgagctcattagtagccagttcgtgaatgttgacgacattgacttcttcttggttaactctttcgacgaactcgaagtcgaggtgctacaatggatgaaaaaccaatggccggtcaagaacataggaccgatgattccatcaatgtacttagacaaacgattagcaggtgacaaagactacggaatcaacctcttcaatgcccaagtcaacgaatgccttgattggcttgactcaaaaccgcccggttcagtgatctacgtgtcttttggaagcttggccgtcttaaaagacgatcaaatgatagaagtcgcggctggtctaaaacaaactggccataacttcttatgggttgttagagaaactgaaacaaagaagcttccaagcaattacatagaggacatttgtgacaagggattgatagtgaattggagtcctcaattacaagttcttgcacataaatcaatcggttgtttcatgactcattgcgggtggaattcgactttagaggcattgagcttaggagttgctttgataggaatgccggcttatagcgaccagccgactaatgctaagtttattgaagatgtgtggaaggttggggttagggttaaggcagatcaaaatgggtttgttccgaaggaagagattgtgagatgtgttggagaagttatggaagatatgtcggagaaagggaaggagattagaaaaaatgctcggaggttgatggagtttgcaagggaagctttgtctgatggaggaaattctgataagaatattgatgagtttgttgctaaaattgtgaggtaaagtgactgtatgattaatctttgatgcttaattaataatgtgtttttaagagttttcaaaggacgaaatgtttagaatgtaacttgttggtttctttcaaagttatttatgatgtgaacaatgtgatctaaaatggtgttgaacttgggaaa

SEQ ID NO: 32905 - protein, 456 aa, Arabidopsis thaliana
  misc_feature (1)..(456): Ceres Seq. ID no. 13601451
MGEKAKANVLVFSFPIQGHINPLLQFSKRLLSKNVNVTFLTTSSTHNSILRRAITGGATALPLSFVPIDDGFEEDHPSTDTSPDYFAKFQENVSRSLSELISSMDPKPNAVVYDSCLPYVLDVCRKHPGVAAASFFTQSSTVNATYIHFLRGEFKEFQNDVVLPAMPPLKGNDLPVFLYDNNLCRPLFELISSQFVNVDDIDFFLVNSFDELEVEVLQWMKNQWPVKNIGPMIPSMYLDKRLAGDKDYGINLFNAQVNECLDWLDSKPPGSVIYVSFGSLAVLKDDQMIEVAAGLKQTGHNFLWVVRETETKKLPSNYIEDICDKGLIVNWSPQLQVLAHKSIGCFMTHCGWNSTLEALSLGVALIGMPAYSDQPTNAKFIEDVWKVGVRVKADQNGFVPKEEIVRCVGEVMEDMSEKGKEIRKNARRLMEFAREALSDGGNSDKNIDEFVAKIVR

SEQ ID NO: 32906 - protein, 353 aa, Arabidopsis thaliana
  misc_feature (1)..(353): Ceres Seq. ID no. 13601452
MDPKPNAVVYDSCLPYVLDVCRKHPGVAAASFFTQSSTVNATYIHFLRGEFKEFQNDVVLPAMPPLKGNDLPVFLYDNNLCRPLFELISSQFVNVDDIDFFLVNSFDELEVEVLQWMKNQWPVKNIGPMIPSMYLDKRLAGDKDYGINLFNAQVNECLDWLDSKPPGSVIYVSFGSLAVLKDDQMIEVAAGLKQTGHNFLWVVRETETKKLPSNYIEDICDKGLIVNWSPQLQVLAHKSIGCFMTHCGWNSTLEALSLGVALIGMPAYSDQPTNAKFIEDVWKVGVRVKADQNGFVPKEEIVRCVGEVMEDMSEKGKEIRKNARRLMEFAREALSDGGNSDKNIDEFVAKIVR

SEQ ID NO: 32907 - protein, 291 aa, Arabidopsis thaliana
  misc_feature (1)..(291): Ceres Seq. ID no. 13601453
MPPLKGNDLPVFLYDNNLCRPLFELISSQFVNVDDIDFFLVNSFDELEVEVLQWMKNQWPVKNIGPMIPSMYLDKRLAGDKDYGINLFNAQVNECLDWLDSKPPGSVIYVSFGSLAVLKDDQMIEVAAGLKQTGHNFLWVVRETETKKLPSNYIEDICDKGLIVNWSPQLQVLAHKSIGCFMTHCGWNSTLEALSLGVALIGMPAYSDQPTNAKFIEDVWKVGVRVKADQNGFVPKEEIVRCVGEVMEDMSEKGKEIRKNARRLMEFAREALSDGGNSDKNIDEFVAKIVR

SEQ ID NO: 32908 - DNA, 1421 bp, Arabidopsis thaliana
  misc_feature (1)..(1421): Ceres Seq. ID no. 13601454
atcatcgatatatacaccgatacatacaccgacacatacgcatgagtgtaagtatacgctcaagtgtgggagcaatctcagatccctccatgaaaacaacgctttataagatgactcattttctgaaacgaactcaactccaagtgtgacacattctcaacgagagatcgtgatcgtacttatatacacacacgcacacttgcaaagcttgggaggaagaagtgatggacaagtatgaggttgtgaaggatttgggagctggaaattttggtgtggctcgtcttcttagacacaaagagaccaaagagctcgttgctatgaaatacattgagagaggtcgcaagattgatgagaatgtggcaagagagattatcaatcatagatcacttaggcatcctaatatcatcagattcaaggaggtgattctgactccaactcatcttgcaattgtaatggagtatgcttctggaggagagctctttgaaagaatctgtaatgctggtagattcagtgaagctgaggctagatacttctttcagcagctgatttgtggcgtggattactgtcattcactgcaaatatgtcatagagatttgaagcttgagaatacactgcttgatggtagtccagccccgcttttgaaaatctgtgattttggttactccaagtcatctctgcttcactctagacctaaatcaactgttggtactccagcttatatcgcacctgaagttctttcccgaagagaatatgacggaaagcatgcggatgtttggtcctgtggtgtgactctttatgtgatgttagttggaggttatccgtttgaagacccggatgatccgagaaacttcaggaaaacaatccaacgtataatggctgtccagtacaagatcccggattacgttcatatatcgcaggagtgcagacaccttctctctcgcatatttgtcactaattcagctaagagaatcacacttaaagagatcaagaagcatccatggtacttaaagaacttgccaaaggagcttacagagcctgctcaagcggcgtactacaagagagaaaccccaagcttttccctccaaagcgtagaggacataatgaagatcgttggagaagccaggaatccagctccgtcttctaatgccgtcaagggctttgatgatgatgaggaagatgtggaggacgaggttgaagaagaagaagaagaagaagaagaagaggaggaagaagaggaagaggaagaagatgaatacgagaagcatgttaaagaggcccattcttgtcaagagcctcccaaagcttaagaaactctcactctgttgtgtaatattcaatctccttgtatctttacgtttatgtgaattcgaagtttcaaaactttatctacgcaattgaccaattagttatcatagcatttg

SEQ ID NO: 32909 - protein, 360 aa, Arabidopsis thaliana
  misc_feature (1)..(360): Ceres Seq. ID no. 13601455
MDKYEVVKDLGAGNFGVARLLRHKETKELVAMKYIERGRKIDENVAREIINHRSLRHPNIIRFKEVILTPTHLAIVMEYASGGELFERICNAGRFSEAEARYFFQQLICGVDYCHSLQICHRDLKLENTLLDGSPAPLLKICDFGYSKSSLLHSRPKSTVGTPAYIAPEVLSRREYDGKHADVWSCGVTLYVMLVGGYPFEDPDDPRNFRKTIQRIMAVQYKIPDYVHISQECRHLLSRIFVTNSAKRITLKEIKKHPWYLKNLPKELTEPAQAAYYKRETPSFSLQSVEDIMKIVGEARNPAPSSNAVKGFDDDEEDVEDEVEEEEEEEEEEEEEEEEEEDEYEKHVKEAHSCQEPPKA

SEQ ID NO: 32910 - protein, 329 aa, Arabidopsis thaliana
  misc_feature (1)..(329): Ceres Seq. ID no. 13601456
MKYIERGRKIDENVAREIINHRSLRHPNIIRFKEVILTPTHLAIVMEYASGGELFERICNAGRFSEAEARYFFQQLICGVDYCHSLQICHRDLKLENTLLDGSPAPLLKICDFGYSKSSLLHSRPKSTVGTPAYIAPEVLSRREYDGKHADVWSCGVTLYVMLVGGYPFEDPDDPRNFRKTIQRIMAVQYKIPDYVHISQECRHLLSRIFVTNSAKRITLKEIKKHPWYLKNLPKELTEPAQAAYYKRETPSFSLQSVEDIMKIVGEARNPAPSSNAVKGFDDDEEDVEDEVEEEEEEEEEEEEEEEEEEDEYEKHVKEAHSCQEPPKA

SEQ ID NO: 32911 - protein, 284 aa, Arabidopsis thaliana
  misc_feature (1)..(284): Ceres Seq. ID no. 13601457
MEYASGGELFERICNAGRFSEAEARYFFQQLICGVDYCHSLQICHRDLKLENTLLDGSPAPLLKICDFGYSKSSLLHSRPKSTVGTPAYIAPEVLSRREYDGKHADVWSCGVTLYVMLVGGYPFEDPDDPRNFRKTIQRIMAVQYKIPDYVHISQECRHLLSRIFVTNSAKRITLKEIKKHPWYLKNLPKELTEPAQAAYYKRETPSFSLQSVEDIMKIVGEARNPAPSSNAVKGFDDDEEDVEDEVEEEEEEEEEEEEEEEEEEDEYEKHVKEAHSCQEPPKA

SEQ ID NO: 32912 - DNA, 1251 bp, Arabidopsis thaliana
  misc_feature (1)..(1251): Ceres Seq. ID no. 13601474
aacttcgtggtactcttttgctttacccatttttcaatgtcttacgatgagatgctttctgctgcgaagaaagctgtttctctcgctgctcgtctcagcaacgaagtgaggaaatctctgttggtaactgacgtttggaacaaatcagatgatagtcctgttactgttgctgattatggttcgcaggcggtggttagccttgtactggaaagggaactccagaatgaacctgtgtctttagtggctgaagaggattctggtgagttaaggaagattgctgctgagaccgttttggctcgtattacagagcttgtcaaagatactcttgcaagtgatgaatcatatgctattgcttctcctttgacttcggatgatgtgctcaacgctatagatcgtggtaaatcagaaggaggtcctaagggtcgccactggatcttggatcctattggtggcactagaggatttataagaggagaacaatatgcaataggattagcattgttggtggaaggcaaagtagtactaggtgtaatggcttgtcctaagcttccattggcatcaactgctggtaatgcactcaagtctttacctgaaaaagttggttgccttttctatggttcggttggcaatgggacttatgtccagtctctcagtgtcgactctcttcctgcgaaggtggaggttagcagcatagatgatcctgcgaaagcgagtttcttcgagtcataccacacacctgtccccatccataacaccattgctacgaaattggggataaaagaatctccaatcaagatcaacagccagactaagtatgcagctttatctagaggagatggagaggtttacttgaggtttactcgcaaagcaagacccgaatcaatatggaatcacgctgctggctcaatcattgtttcagaagcaggagggaaagtgactgatgcagcagggaatccattggacttttcgaaagggaagtatcttgattacaagagaggaatcgtcgttacgacgcagaaactgttgccaaggcttttaacagcagtaagagaatcaattaaagaagaagaagaggaagaagaaaaagctgcttctctaaaacttcactaacacgcaactgtaatatacttattattgttgtctttgggtatactctgttgtctctgtgtttttcacagtctatttattgaaaaccagaaacaaaaaaaaaactcacctttgatatatataagaaacactaattctcttttg

SEQ ID NO: 32913 - protein, 369 aa, Arabidopsis thaliana
  misc_feature (1)..(369): Ceres Seq. ID no. 13601475
NFVVLFCFTHFSMSYDEMLSAAKKAVSLAARLSNEVRKSLLVTDVWNKSDDSPVTVADYGSQAVVSLVLERELQNEPVSLVAEEDSGELRKIAAETVLARITELVKDTLASDESYAIASPLTSDDVLNAIDRGKSEGGPKGRHWILDPIGGTRGFIRGEQYAIGLALLVEGKVVLGVMACPKLPLASTAGNALKSLPEKVGCLFYGSVGNGTYVQSLSVDSLPAKVEVSSIDDPAKASFFESYHTPVPIHNTIATKLGIKESPIKINSQTKYAALSRGDGEVYLRFTRKARPESIWNHAAGSIIVSEAGGKVTDAAGNPLDFSKGKYLDYKRGIVVTTQKLLPRLLTAVRESIKEEEEEEEKAASLKLH

SEQ ID NO: 32914 - protein, 357 aa, Arabidopsis thaliana
  misc_feature (1)..(357): Ceres Seq. ID no. 13601476
MSYDEMLSAAKKAVSLAARLSNEVRKSLLVTDVWNKSDDSPVTVADYGSQAVVSLVLERELQNEPVSLVAEEDSGELRKIAAETVLARITELVKDTLASDESYAIASPLTSDDVLNAIDRGKSEGGPKGRHWILDPIGGTRGFIRGEQYAIGLALLVEGKVVLGVMACPKLPLASTAGNALKSLPEKVGCLFYGSVGNGTYVQSLSVDSLPAKVEVSSIDDPAKASFFESYHTPVPIHNTIATKLGIKESPIKINSQTKYAALSRGDGEVYLRFTRKARPESIWNHAAGSIIVSEAGGKVTDAAGNPLDFSKGKYLDYKRGIVVTTQKLLPRLLTAVRESIKEEEEEEEKAASLKLH

SEQ ID NO: 32915 - protein, 352 aa, Arabidopsis thaliana
  misc_feature (1)..(352): Ceres Seq. ID no. 13601477
MLSAAKKAVSLAARLSNEVRKSLLVTDVWNKSDDSPVTVADYGSQAVVSLVLERELQNEPVSLVAEEDSGELRKIAAETVLARITELVKDTLASDESYAIASPLTSDDVLNAIDRGKSEGGPKGRHWILDPIGGTRGFIRGEQYAIGLALLVEGKVVLGVMACPKLPLASTAGNALKSLPEKVGCLFYGSVGNGTYVQSLSVDSLPAKVEVSSIDDPAKASFFESYHTPVPIHNTIATKLGIKESPIKINSQTKYAALSRGDGEVYLRFTRKARPESIWNHAAGSIIVSEAGGKVTDAAGNPLDFSKGKYLDYKRGIVVTTQKLLPRLLTAVRESIKEEEEEEEKAASLKLH

SEQ ID NO: 32916 - DNA, 845 bp, Arabidopsis thaliana
  misc_feature (1)..(845): Ceres Seq. ID no. 13601478
ctcattttccaccattaaaaaacctctctactctctcctcaaaaactcaaaagagcaaaaaaaagagaagaagaatcaaaatcccacacaatggcaacacactcttccttcaccgcaacaacacctctctttctcatcgttcttctatccctatcctccgtctcagttctcggcgcatctcaccaccacgcaacggcgccggctccgtctgtagactgttcgactctcatactcaacatggctgactgtttatccttcgtttcgagcggaggcacggtggcgaaaccggaaggtacatgttgctctggtcttaagacggtgcttaaagctgactctcagtgtctatgtgaagcgtttaagagcagtgcttctcttggagttactttgaatatcactaaggcttctactcttcccgccgcatgcaagcttcacgctccttctatcgctacttgtggattgtctgttgctccaagtactgctccaggtcttgctccaggagtagctgctgctggacctgagacagccggatttctagctccaaatccttcttcagggaacgatggatcttctttgattccgacctcgttcacaactgtactcagtgccgtactgttcgttttgttcttctctagtgcgtaaaaaaaaacctgaatcttttttcaccagctagatttggctgtatgaaattgattaatggtttttattagggttaatctatgtatgttttggagtgttctgtttttagaccatatcggtttctctattactagcgtttactcttttagtttatgttattactttgtctcacaacattggtccttttattcgatctatcgcttattcct

SEQ ID NO: 32917 - protein, 182 aa, Arabidopsis thaliana
  misc_feature (1)..(182): Ceres Seq. ID no. 13601479
MATHSSFTATTPLFLIVLLSLSSVSVLGASHHHATAPAPSVDCSTLILNMADCLSFVSSGGTVAKPEGTCCSGLKTVLKADSQCLCEAFKSSASLGVTLNITKASTLPAACKLHAPSIATCGLSVAPSTAPGLAPGVAAAGPETAGFLAPNPSSGNDGSSLIPTSFTTVLSAVLFVLFFSSA

SEQ ID NO: 32918 - protein, 133 aa, Arabidopsis thaliana
  misc_feature (1)..(133): Ceres Seq. ID no. 13601480
MADCLSFVSSGGTVAKPEGTCCSGLKTVLKADSQCLCEAFKSSASLGVTLNITKASTLPAACKLHAPSIATCGLSVAPSTAPGLAPGVAAAGPETAGFLAPNPSSGNDGSSLIPTSFTTVLSAVLFVLFFSSA

SEQ ID NO: 32919 - DNA, 1234 bp, Arabidopsis thaliana
  misc_feature (1)..(1234): Ceres Seq. ID no. 13601481
acaacaaacacaacttctacaagactcaaatagtttctatttaattactaaaaagaaaaatgggtcgtggttacaatttgctattcgttctagtaacgtttttagtattggttgcagctgtaaccgcacaagggaaccgtggctcaaacagcggtggtggtcgaagaccacatgttgggttttatgggaatagatgccgaaacgtagagtctattgtgagatctgtagttcagtctcatgtccggtctatcccggctaatgcacctggaattttgcgaatgcatttccacgattgctttgtccatggctgcgatggctcggttctcctcgctggtaacacctcagagagaaccgcagttccgaaccgttcattgagagggttcgaagttattgaagaagctaaggctcggcttgagaaggcttgtcctcgtaccgtttcttgtgctgatattctcacccttgcagcccgagacgccgtcgttttgaccggtggacaacgctgggaagtgcccttgggacgtctcgacggccgaatctcgcaagcctcagacgtgaacttgcccggaccaagcgactccgttgctaagcagaagcaagacttcgctgctaaaactctcaacacattagacctcgtgactcttgttggcggacacacaataggaactgctggctgcggtctagtaaggggaaggttcgttaacttcaacggcacaggacaacctgacccatcaatcgacccgagttttgtgccgctgattctggctcagtgccctcaaaatggaggcacccgagtggagttagacgagggaagtgttgacaagtttgacacatcgttcctaaggaaggtgacgtcaagtcgcgtggttctccaatccgatctagtcctatggaaggatcccgagacccgagccatcattgaacgtttattaggattacgccgaccatccttgaggttcggaaccgagttcgggaagtcgatggtcaaaatgagtctcatagaagttaagactggatcagatggggagattcgtcgggtttgttccgccatcaactaagatttaaaaaaacacaaatgtgagctttgtttttcatttatgaattcgttaattaataatcacttgttttaaataaaagcttgctacagcattttgtggtcgatggttacgttttgattttcaagtgtaagattgtacttgtaaacaaaaaatgtattatataaaagtgttatttgttt

SEQ ID NO: 32920 - protein, 331 aa, Arabidopsis thaliana
  misc_feature (1)..(331): Ceres Seq. ID no. 13601482
MGRGYNLLFVLVTFLVLVAAVTAQGNRGSNSGGGRRPHVGFYGNRCRNVESIVRSVVQSHVRSIPANAPGILRMHFHDCFVHGCDGSVLLAGNTSERTAVPNRSLRGFEVIEEAKARLEKACPRTVSCADILTLAARDAVVLTGGQRWEVPLGRLDGRISQASDVNLPGPSDSVAKQKQDFAAKTLNTLDLVTLVGGHTIGTAGCGLVRGRFVNFNGTGQPDPSIDPSFVPLILAQCPQNGGTRVELDEGSVDKFDTSFLRKVTSSRVVLQSDLVLWKDPETRAIIERLLGLRRPSLRFGTEFGKSMVKMSLIEVKTGSDGEIRRVCSAIN

SEQ ID NO: 32921 - protein, 258 aa, Arabidopsis thaliana
  misc_feature (1)..(258): Ceres Seq. ID no. 13601483
MHFHDCFVHGCDGSVLLAGNTSERTAVPNRSLRGFEVIEEAKARLEKACPRTVSCADILTLAARDAVVLTGGQRWEVPLGRLDGRISQASDVNLPGPSDSVAKQKQDFAAKTLNTLDLVTLVGGHTIGTAGCGLVRGRFVNFNGTGQPDPSIDPSFVPLILAQCPQNGGTRVELDEGSVDKFDTSFLRKVTSSRVVLQSDLVLWKDPETRAIIERLLGLRRPSLRFGTEFGKSMVKMSLIEVKTGSDGEIRRVCSAIN

SEQ ID NO: 32922 - DNA, 677 bp, Arabidopsis thaliana
  misc_feature (1)..(677): Ceres Seq. ID no. 13601494
taacaacaacaacaaagcaaaaacactcccaaaccaaaaaaagaagaagaagaagctaaattcgaatctctctcttttttgaaatatggctttttccaaatctctagtgtttgttcttctcgctgctcttttgatttcttccgcagtggctcaatctccggctccagctccatctaacgtcggaggtagacggatctcaccggctccttcacctaagaagatgactgctcctgctcctgcacctgaagtttctccttctccttctccggcagccgcattgactccagaatcctctgcttcaccaccatcgccgcctctagctgattctcctaccgctgactccccggctttgtctccatctgcgatctccgattctccgactgaagctcctggtcctgctcagggcggcgccgtttcgaacaaattcgccagtttcggatctgtggcggttatgttaactgctgccgttttggttatctaggttgttccgatcaatgaagcttctttgattttatttatttattttagatatattagagttttgtgagagagatgatgattcattatttttctcttctttctattattttctttgaatatttttctttcttcggctgatcctatgcgcgtttgtatctatccaatatttatctatctatatgatttatcagattttc

SEQ ID NO: 32923 - protein, 131 aa, Arabidopsis thaliana
  misc_feature (1)..(131): Ceres Seq. ID no. 13601495
MAFSKSLVFVLLAALLISSAVAQSPAPAPSNVGGRRISPAPSPKKMTAPAPAPEVSPSPSPAAALTPESSASPPSPPLADSPTADSPALSPSAISDSPTEAPGPAQGGAVSNKFASFGSVAVMLTAAVLVI

SEQ ID NO: 32924 - protein, 86 aa, Arabidopsis thaliana
  misc_feature (1)..(86): Ceres Seq. ID no. 13601496
MTAPAPAPEVSPSPSPAAALTPESSASPPSPPLADSPTADSPALSPSAISDSPTEAPGPAQGGAVSNKFASFGSVAVMLTAAVLVI

SEQ ID NO: 32925 - DNA, 647 bp, Arabidopsis thaliana
  misc_feature (1)..(647): Ceres Seq. ID no. 13601497
aaatcacaaatcttcaacttccgatactttcaatctctctaaactctcaatttcagtaatcgataaccgtagcaatggaatccaccggaaaagtgaagaaagctttcggaggaagaaaaccacctggtgccccaaaaaccaaatcggtttcgaaatcgatgaaagccggtcttcaattcccagtgggaagaatcactcgtttcctgaagaaaggacgatacgctcagagacttggtggtggtgctccggtttacatggccgccgttcttgaatacctcgccgcagaagttctggagcttgctggtaacgctgcgagagataacaagaaatcaaggataattccgaggcatcttcttctcgcgataaggaacgatgaagaattggggaaacttctgagtggtgtcacaatcgctcacggtggtgttttgcctaacatcaactctgttctattgcctaagaagtctgccactaaaccagctgaagaaaaggctaccaaatcaccagtcaagtctccaaagaaagcttaatctgctagagttttcgttgctagtttgtgtttgagctctggtgaatgtagaaatttgaagcttttggatcttagtttctatgtatttggtgatttagaatgttgttcaaaatccttttcc

SEQ ID NO: 32926 - protein, 150 aa, Arabidopsis thaliana
  misc_feature (1)..(150): Ceres Seq. ID no. 13601498
MESTGKVKKAFGGRKPPGAPKTKSVSKSMKAGLQFPVGRITRFLKKGRYAQRLGGGAPVYMAAVLEYLAAEVLELAGNAARDNKKSRIIPRHLLLAIRNDEELGKLLSGVTIAHGGVLPNINSVLLPKKSATKPAEEKATKSPVKSPKKA

SEQ ID NO: 32927 - protein, 122 aa, Arabidopsis thaliana
  misc_feature (1)..(122): Ceres Seq. ID no. 13601499
MKAGLQFPVGRITRFLKKGRYAQRLGGGAPVYMAAVLEYLAAEVLELAGNAARDNKKSRIIPRHLLLAIRNDEELGKLLSGVTIAHGGVLPNINSVLLPKKSATKPAEEKATKSPVKSPKKA

SEQ ID NO: 32928 - protein, 90 aa, Arabidopsis thaliana
  misc_feature (1)..(90): Ceres Seq. ID no. 13601500
MAAVLEYLAAEVLELAGNAARDNKKSRIIPRHLLLAIRNDEELGKLLSGVTIAHGGVLPNINSVLLPKKSATKPAEEKATKSPVKSPKKA

SEQ ID NO: 32929 - DNA, 1119 bp, Arabidopsis thaliana
  misc_feature (1)..(1119): Ceres Seq. ID no. 13601501
attgtaacttgtaaccagtgtcggctaatttcgacttttgtagatctttttctgctctttctctctctctctctctctctctctctctctctctctctcttgtattatttctatctcccccgccgtcgaaagagaaacgtcgatcggagaacctttgaaatgtcgactggattagatatgtctctcgacgacatgatcgccaagaaccgtaagtctcgtggtggagccggccccgctcgtggaaccggatccggatccggaccgggtccgactcgccgcaacaaccctaatcggaaatcaacccgatctgctccataccaatcagccaaggcgccggagtccacctggggtcacgacatgttctccgatagatctgaagatcaccgatcgggacgttcctccgccggaatcgaaactggaaccaagctctacatttccaatttggattacggtgtcatgaacgaagacatcaaggaactgtttgctgaagttggagaacttaaacgctacacagttcattttgatagaagtggaagatcaaagggaactgctgaagtagtgtattctcggcgtggcgatgcactcgcagctgtgaagaagtataatgatgttcagctggatggaaaacccatgaagatagagattgtgggcactaatcttcaaactgctgcagccccgtctggtagacctgcgaatggaaactccaatggtgctccatggagaggaggacaagggagaggaggtcaacaacgaggtggtggacgaggaggcggtggccgaggtggtggtggtcgtggtaggcgtcctggtaagggccctgcagagaagatttctgcggaagatcttgatgcggatcttgataagtaccattctggagatatggagacaaactaaggaacgtgactgatcttctcaaaccggtaggggttttaggaggaagagaatcgagaaaatgtttgccagaggctttaccacttagcgcctttttggctgtgttgttcatttgtttcattagaatgactttacagaattgagaatatgtgttatttaaagttgttgtctatcttaataccctcaagtgaaaggcagaggaaggaataccaatttcgtttacagatc

SEQ ID NO: 32930 - protein, 297 aa, Arabidopsis thaliana
  misc_feature (1)..(297): Ceres Seq. ID no. 13601502
IVTCNQCRLISTFVDLFLLFLSLSLSLSLSLSLLYYFYLPRRRKRNVDRRTFEMSTGLDMSLDDMIAKNRKSRGGAGPARGTGSGSGPGPTRRNNPNRKSTRSAPYQSAKAPESTWGHDMFSDRSEDHRSGRSSAGIETGTKLYISNLDYGVMNEDIKELFAEVGELKRYTVHFDRSGRSKGTAEVVYSRRGDALAAVKKYNDVQLDGKPMKIEIVGTNLQTAAAPSGRPANGNSNGAPWRGGQGRGGQQRGGGRGGGGRGGGGRGRRPGKGPAEKISAEDLDADLDKYHSGDMETN

SEQ ID NO: 32931 - protein, 244 aa, Arabidopsis thaliana; identical to SEQ ID NO: 30290
  misc_feature (1)..(244): Ceres Seq. ID no. 13601503

SEQ ID NO: 32932 - protein, 238 aa, Arabidopsis thaliana; identical to SEQ ID NO: 30291
  misc_feature (1)..(238): Ceres Seq. ID no. 13601504

SEQ ID NO: 32933 - DNA, 976 bp, Arabidopsis thaliana
  misc_feature (1)..(976): Ceres Seq. ID no. 13601511
acacaaacaaaatatcaacactcttgaaaacagagccatggaacattctctcatcatcctcctcttcaccgtcctcctcctcctcaccaccactcccggaatcctatctcagccctctccagccgtcgctccggccccaccaggacccacaaacgttaccaaaatcctagagaaagctggtcaattcaccgtcttcatccgactcctcaaatccactggagtcgctaaccaactctacggccaactaaacaactccgacaatggaatcactatattcgcaccgagtgattcctcgttcaccggtctcaaagccgggaccctaaattcgttaaccgatgagcaacaagtagagcttattcagtttcatgtcataccaagttacgtctcttcctcaaacttccaaacaataagtaaccctctccggactcaggccggtgactccgccgatggacattttcctctcaacgttaccaccagtggcaataccgtaaatatcacgtccggcgtaaccaacaccaccgtctccggcaatgtctacagcgatggacagctcgctgtttatcaggtcgataaggttttgcttccacaacaagttttcgatcctcgtcctcctgctccggctccggctccgtctgtatcgaaatcaaagaagaagaaggatgacagtgatagttccagtgatgattctccggcggatgcttcgtttgctttgcgtaatgttggttctgtgtgtgatgcggtgtcgttttgcgtcatgagtgtaatgctcgcatggttttatttgtgatgaaaagctttttttttttttgtgctgataaattgttattttttattactcatgattttctgccatgtgggtgattttggggatatatttgtgtcttggttttcatacgattttgtgttaatcaatccatttgttttttatattttcgtttatttttattaatacaaatcatattttccgttttcgtgc

SEQ ID NO: 32934 - protein, 261 aa, Arabidopsis thaliana
  misc_feature (1)..(261): Ceres Seq. ID no. 13601512
HKQNINTLENRAMEHSLIILLFTVLLLLTTTPGILSQPSPAVAPAPPGPTNVTKILEKAGQFTVFIRLLKSTGVANQLYGQLNNSDNGITIFAPSDSSFTGLKAGTLNSLTDEQQVELIQFHVIPSYVSSSNFQTISNPLRTQAGDSADGHFPLNVTTSGNTVNITSGVTNTTVSGNVYSDGQLAVYQVDKVLLPQQVFDPRPPAPAPAPSVSKSKKKKDDSDSSSDDSPADASFALRNVGSVCDAVSFCVMSVMLAWFYL

SEQ ID NO: 32935 - protein, 249 aa, Arabidopsis thaliana
  misc_feature (1)..(249): Ceres Seq. ID no. 13601513
MEHSLIILLFTVLLLLTTTPGILSQPSPAVAPAPPGPTNVTKILEKAGQFTVFIRLLKSTGVANQLYGQLNNSDNGITIFAPSDSSFTGLKAGTLNSLTDEQQVELIQFHVIPSYVSSSNFQTISNPLRTQAGDSADGHFPLNVTTSGNTVNITSGVTNTTVSGNVYSDGQLAVYQVDKVLLPQQVFDPRPPAPAPAPSVSKSKKKKDDSDSSSDDSPADASFALRNVGSVCDAVSFCVMSVMLAWFYL

SEQ ID NO: 32936 - DNA, 1100 bp, Arabidopsis thaliana
  misc_feature (1)..(1100): Ceres Seq. ID no. 13601514
aaaaaccccaaacttcttgattctcccctccgataaccaaaaaatccctattttccgagatgaataatacacgagaagaagtaggggaattcactcaaatcttcaacgctttaatgagtcttatgaggaaatttatattcaaagttctacgcgtcggtccaatccctactaacatttctttcatcatggatggaaaccgtaggttcgccaagaaacgcaatcttgaaggcctagacgcaggacacagagctggtttcatatccgtcaaatatattcttcaatactgcaaagagattggtgtaccgtatgtcacactctacgcatttggtatggacaatttcaagagaggacctgaagaagtcaagtgtgtgatggatctaatgcttgagaaagtcgagctcacgatcgatcaagctgtatcagggaatatgaacggcgtgagaataatctttgccggcgatttgaattcgttaaacgagcgttttagagctgcgacaaagaaactgatggagcttacggaggagaacagagatctgattgttgtggtttgcgttgcttatagcacaagtgtcgagattgttcacgctgttcgagattcttgtgttagaaagagtaaaactggagatggttcttcagctttggagttgagtgatattgaagagtgtatgtatacatcggttgtgccggttccggatcttgtggtaagaaccggaggaggagatcggctgagtaacttcatgacgtggcaaacttctagggcacttcttcatagaacggaggctctttggccggagttagggctatggcatttggtttgggccattctgaaattccagagaatgcaagattacttgcagaagaagaagaagctccactaaatagtttctaagttaaaccctagaatgaacttaaacccttatgtttgattacatgtttcttgtggtgtaagaaacaacgaaccgaaactgagaaaccacaagaaaatcctttttattatgtatgggatacaaaataacaaaaacagacataaaacatcgataattattcaatttaacgatgctaaaacactacaattagaggcttaattaaaagacagtttg

SEQ ID NO: 32937 - protein, 272 aa, Arabidopsis thaliana
  misc_feature (1)..(272): Ceres Seq. ID no. 13601515
MNNTREEVGEFTQIFNALMSLMRKFIFKVLRVGPIPTNISFIMDGNRRFAKKRNLEGLDAGHRAGFISVKYILQYCKEIGVPYVTLYAFGMDNFKRGPEEVKCVMDLMLEKVELTIDQAVSGNMNGVRIIFAGDLNSLNERFRAATKKLMELTEENRDLIVVVCVAYSTSVEIVHAVRDSCVRKSKTGDGSSALELSDIEECMYTSVVPVPDLVVRTGGGDRLSNFMTWQTSRALLHRTEALWPELGLWHLVWAILKFQRMQDYLQKKKKLH

SEQ ID NO: 32938 - protein, 254 aa, Arabidopsis thaliana
  misc_feature (1)..(254): Ceres Seq. ID no. 13601516
MSLMRKFIFKVLRVGPIPTNISFIMDGNRRFAKKRNLEGLDAGHRAGFISVKYILQYCKEIGVPYVTLYAFGMDNFKRGPEEVKCVMDLMLEKVELTIDQAVSGNMNGVRIIFAGDLNSLNERFRAATKKLMELTEENRDLIVVVCVAYSTSVEIVHAVRDSCVRKSKTGDGSSALELSDIEECMYTSVVPVPDLVVRTGGGDRLSNFMTWQTSRALLHRTEALWPELGLWHLVWAILKFQRMQDYLQKKKKLH

SEQ ID NO: 32939 - protein, 251 aa, Arabidopsis thaliana
  misc_feature (1)..(251): Ceres Seq. ID no. 13601517
MRKFIFKVLRVGPIPTNISFIMDGNRRFAKKRNLEGLDAGHRAGFISVKYILQYCKEIGVPYVTLYAFGMDNFKRGPEEVKCVMDLMLEKVELTIDQAVSGNMNGVRIIFAGDLNSLNERFRAATKKLMELTEENRDLIVVVCVAYSTSVEIVHAVRDSCVRKSKTGDGSSALELSDIEECMYTSVVPVPDLVVRTGGGDRLSNFMTWQTSRALLHRTEALWPELGLWHLVWAILKFQRMQDYLQKKKKLH

SEQ ID NO: 32940 - DNA, 1175 bp, Arabidopsis thaliana
  misc_feature (1)..(1175): Ceres Seq. ID no. 13601532
acattcatcaacacaaaagatacccagagagacataagaaagaaagagagagagagatactttggtcatttcagggttgtcgtttctctctcttgttcttgagattttgaagagagagagatatgggaagaggtagggttcagctgaagaggatagagaacaagatcaataggcaagttactttctcaaagagaaggtctggtttgctcaagaaagctcatgagatctctgttctctgcgatgctgaggttgctctcatcgtcttctcttccaaaggcaaactcttcgaatattccaccgactcttgcatggagaggatacttgaacgctatgatcgctatttatattcagacaaacaacttgttggccgagacgtttcacaaagtgaaaattgggttctagaacatgctaagctcaaggcaagagttgaggtacttgagaagaacaaaaggaattttatgggggaagatcttgattcgttgagcttgaaggagctccaaagcttggagcatcagctcgatgcagctatcaagagcattaggtcaagaaagaaccaagctatgttcgaatccatatctgcgctccagaagaaggataaagccttgcaagatcacaacaattcgcttctcaaaaagattaaggagagggagaagaaaacgggtcagcaagaaggacaattagtccaatgctccaactcttcttcagttcttctgcctcaatactgcgtaacctcctccagagatggctttgtggagagagttgggggagagaacggtggtgcatcgtcgttgacggaaccaaactctctgcttccggcttggatgttacgtcctaccactacgaacgagtagaactatctcactctttataatataatgataatataattaatgtttaatattttcataacattcagcatttttttggtgacttatactcattattaataccgatatgttttagctagtcatattatatgtatgatggaactccgttgtcgagacgtatgtacgtaagctatcattagattcactgcgtcttaagaacaaagattcatatcttggtaatgatttctcatgaataattaatgtaacttttactttttaaactgtggtgaacgcaatatatcaatattctatcatttgtaaatgcgatcactatgttttttatgactg

SEQ ID NO: 32941 - protein, 242 aa, Arabidopsis thaliana
  misc_feature (1)..(242): Ceres Seq. ID no. 13601533
MGRGRVQLKRIENKINRQVTFSKRRSGLLKKAHEISVLCDAEVALIVFSSKGKLFEYSTDSCMERILERYDRYLYSDKQLVGRDVSQSENWVLEHAKLKARVEVLEKNKRNFMGEDLDSLSLKELQSLEHQLDAAIKSIRSRKNQAMFESISALQKKDKALQDHNNSLLKKIKEREKKTGQQEGQLVQCSNSSSVLLPQYCVTSSRDGFVERVGGENGGASSLTEPNSLLPAWMLRPTTTNE

SEQ ID NO: 32942 - protein, 180 aa, Arabidopsis thaliana
  misc_feature (1)..(180): Ceres Seq. ID no. 13601534
MERILERYDRYLYSDKQLVGRDVSQSENWVLEHAKLKARVEVLEKNKRNFMGEDLDSLSLKELQSLEHQLDAAIKSIRSRKNQAMFESISALQKKDKALQDHNNSLLKKIKEREKKTGQQEGQLVQCSNSSSVLLPQYCVTSSRDGFVERVGGENGGASSLTEPNSLLPAWMLRPTTTNE

SEQ ID NO: 32943 - protein, 130 aa, Arabidopsis thaliana
  misc_feature (1)..(130): Ceres Seq. ID no. 13601535
MGEDLDSLSLKELQSLEHQLDAAIKSIRSRKNQAMFESISALQKKDKALQDHNNSLLKKIKEREKKTGQQEGQLVQCSNSSSVLLPQYCVTSSRDGFVERVGGENGGASSLTEPNSLLPAWMLRPTTTNE

SEQ ID NO: 32944 - DNA, 1765 bp, Arabidopsis thaliana
  misc_feature (1)..(1765): Ceres Seq. ID no. 13601536
aaaaatgtctcattgcttctctcgttctaaaaaaaatcttgctgctatctctctataagtccactcctccttcaagcaaagcaccttcctcttctttttgctcctctgagattggtttaagattaaaccagacccatctaagggatctggaacaagcttcgtctctggttccactctgatcatcagagtattaaaaatggagtctttcttctccagatccacctccatcgtctccaaattgagtttcttggccttatggatcgtcttcttgatttcttcatcttcttttacttcgacagaagcatatgatgcgcttgatccagaaggcaacattacaatgaaatgggatgttatgagctggactcctgatggctatgttgccgtggttacgatgttcaacttccagaaatacagacacattcaatctccaggatggacattaggttggaaatgggcaaagaaggaagttatatggagtatggttggagcacaaacaactgaacaaggtgattgttcaaagtacaaaggaaacataccacattgttgtaagaaggatccaacagttgtagacttgcttccagggactccttataatcagcagattgctaattgctgcaagggtggtgttatgaactcatgggttcaagaccctgccactgcggctagctccttccagattagtgttggtgctgctggaaccacaaacaaaaccgttagggtcccaagaaacttcactctcatgggacctggtccaggttacacttgtggtccagcaaagattgtcagaccaacaaaatttgtcacgactgacacacgcagaaccactcaagctatgatgacatggaacattacgtgcacatactcgcagttccttgctcaaagaactccaacttgctgtgtttctttatcttctttctacaatgaaaccattgttggatgtccaacttgtgcttgcggatgtcaaaacaacagaacagaatccggtgcctgcctcgacccggacacaccacacttagcctcggttgtgtcaccaccaacaaagaaaggaacggttttaccaccattagtgcaatgcacgagacacatgtgcccgatcagagtgcattggcatgtaaagcagaactacaaagagtattggcgtgtgaagatcacaatcacaaacttcaactatcgcttgaactacacacaatggaaccttgttgctcaacatccaaatctcgacaacatcactcaaatcttcagcttcaactacaaatctcttactccttacgctggactaaacgatacggcgatgttatggggagtgaagttctacaacgatttcttatcagaagcaggtcctcttgggaatgttcaatcagagattttgttccgtaaagaccaatcaaccttcacattcgagaaaggttgggcttttccacgaaggatttactttaatggagacaattgcgtcatgcctcctccagactcttacccttttcttcccaacggtggttcccggtcacaattctcattcgtcgccgccgtgctcctccctcttcttgtctttttcttcttctctgcctaatctcggatttacggttttgccactggtttgcttagggttacggcggagtggtataaacgtttatttatgattcttttgtgtcccacaaaaattataatcttttgatactttttaaaaatataaatagttttcaacttccttgtttttaaaagaaatttatatccttgtgttctgttggtccgtcgttgtagaatatcg

SEQ ID NO: 32945 - protein, 456 aa, Arabidopsis thaliana
  misc_feature (1)..(456): Ceres Seq. ID no. 13601537
MESFFSRSTSIVSKLSFLALWIVFLISSSSFTSTEAYDALDPEGNITMKWDVMSWTPDGYVAVVTMFNFQKYRHIQSPGWTLGWKWAKKEVIWSMVGAQTTEQGDCSKYKGNIPHCCKKDPTVVDLLPGTPYNQQIANCCKGGVMNSWVQDPATAASSFQISVGAAGTTNKTVRVPRNFTLMGPGPGYTCGPAKIVRPTKFVTTDTRRTTQAMMTWNITCTYSQFLAQRTPTCCVSLSSFYNETIVGCPTCACGCQNNRTESGACLDPDTPHLASVVSPPTKKGTVLPPLVQCTRHMCPIRVHWHVKQNYKEYWRVKITITNFNYRLNYTQWNLVAQHPNLDNITQIFSFNYKSLTPYAGLNDTAMLWGVKFYNDFLSEAGPLGNVQSEILFRKDQSTFTFEKGWAFPRRIYFNGDNCVMPPPDSYPFLPNGGSRSQFSFVAAVLLPLLVFFFFSA

SEQ ID NO: 32946 - protein, 409 aa, Arabidopsis thaliana
  misc_feature (1)..(409): Ceres Seq. ID no. 13601538
MKWDVMSWTPDGYVAVVTMFNFQKYRHIQSPGWTLGWKWAKKEVIWSMVGAQTTEQGDCSKYKGNIPHCCKKDPTVVDLLPGTPYNQQIANCCKGGVMNSWVQDPATAASSFQISVGAAGTTNKTVRVPRNFTLMGPGPGYTCGPAKIVRPTKFVTTDTRRTTQAMMTWNITCTYSQFLAQRTPTCCVSLSSFYNETIVGCPTCACGCQNNRTESGACLDPDTPHLASVVSPPTKKGTVLPPLVQCTRHMCPIRVHWHVKQNYKEYWRVKITITNFNYRLNYTQWNLVAQHPNLDNITQIFSFNYKSLTPYAGLNDTAMLWGVKFYNDFLSEAGPLGNVQSEILFRKDQSTFTFEKGWAFPRRIYFNGDNCVMPPPDSYPFLPNGGSRSQFSFVAAVLLPLLVFFFFSA

SEQ ID NO: 32947 - protein, 404 aa, Arabidopsis thaliana
  misc_feature (1)..(404): Ceres Seq. ID no. 13601539
MSWTPDGYVAVVTMFNFQKYRHIQSPGWTLGWKWAKKEVIWSMVGAQTTEQGDCSKYKGNIPHCCKKDPTVVDLLPGTPYNQQIANCCKGGVMNSWVQDPATAASSFQISVGAAGTTNKTVRVPRNFTLMGPGPGYTCGPAKIVRPTKFVTTDTRRTTQAMMTWNITCTYSQFLAQRTPTCCVSLSSFYNETIVGCPTCACGCQNNRTESGACLDPDTPHLASVVSPPTKKGTVLPPLVQCTRHMCPIRVHWHVKQNYKEYWRVKITITNFNYRLNYTQWNLVAQHPNLDNITQIFSFNYKSLTPYAGLNDTAMLWGVKFYNDFLSEAGPLGNVQSEILFRKDQSTFTFEKGWAFPRRIYFNGDNCVMPPPDSYPFLPNGGSRSQFSFVAAVLLPLLVFFFFSA

SEQ ID NO: 32948 - DNA, 1364 bp, Arabidopsis thaliana
  misc_feature (1)..(1364): Ceres Seq. ID no. 13601560
ataattttctaagaggcgtgactttaaaaatctgtaaaaaagcaaatccgaagaaagagagagagagaaggtgattttgaaatttcagataacgcagaatttttttattctcgccggagttttctcctcccaccgtctctgattctcgtcgccgccgtacacagttgttgttctctgccgtttctgcaagatgattggatcgtttcttacaagaggattggtgatggtgttgggctatgcttaccctgcgtatgaatgttacaagactgttgaaaagaataggcctgaaatcgagcaacttcgcttttggtgtcagtactggatattggttgcttgcttgacagtttttgagagagttggtgatgcgtttgtttcatgggttccgatgtacagtgaagctaagttggcattcttcatatacctgtggtatcctaaaaccaggggtactacatatgtctacgagtccttctttaggccatatctctcacagcatgagaatgacatagaccatagtttgctcgagctaaggactagagcaggagatatggctgttatatactggcaacgagttgcaagttatggtcagaccagaatccttgagattttgcagtatgttgctgcacaatcaactccaagaccgcagccacctcagaaacgtggaggtagagctaatcaagctcctgcgaagcctaagaaagcccctgtcccccaatcagaacctgaagaagtatcattgtcctcgtcttctagctcatcttcaagtgaaaatgaaggtaatgagccaacccgtaaagtatcaggcccgtcaagacctagaccaacagtgacatctgtaccagctgcagatcccaaaaacgcgggtaccactcagatagcacagaaatcagtagcttccccaattgtgaacccaccacagtcaaccacccaagtggaaccaatgcagatagaagaagtggaaggagaggcagaatcagggaatgaaaatcccaacccggaaggtccaaaggagacagtgatggaggagacaatcaggatgactcgtgggaggttgaggaagacgcgttcggaagaaagccgttgaaagaagaagaagaagctcaatccaaaaaattgttacttacttgcataacagtggtctctcttctctcttactctatgtttcctgcttctagaattacgttgacaggaactaacaactagtgggaatggttgtatgaaaagttaatctgttggttttgttcttttattcaatttagttgcatctttgacaaaaaaaaaaaaaaaatcaatttagttgcattaagtgtaaaagataacactcttgttttgtttgttcctttcgataactaattcggtaaaatagg

SEQ ID NO: 32949 - protein, 296 aa, Arabidopsis thaliana
  misc_feature (1)..(296): Ceres Seq. ID no. 13601561
MIGSFLTRGLVMVLGYAYPAYECYKTVEKNRPEIEQLRFWCQYWILVACLTVFERVGDAFVSWVPMYSEAKLAFFIYLWYPKTRGTTYVYESFFRPYLSQHENDIDHSLLELRTRAGDMAVIYWQRVASYGQTRILEILQYVAAQSTPRPQPPQKRGGRANQAPAKPKKAPVPQSEPEEVSLSSSSSSSSSENEGNEPTRKVSGPSRPRPTVTSVPAADPKNAGTTQIAQKSVASPIVNPPQSTTQVEPMQIEEVEGEAESGNENPNPEGPKETVMEETIRMTRGRLRKTRSEESR

SEQ ID NO: 32950 - protein, 285 aa, Arabidopsis thaliana
  misc_feature (1)..(285): Ceres Seq. ID no. 13601562
MVLGYAYPAYECYKTVEKNRPEIEQLRFWCQYWILVACLTVFERVGDAFVSWVPMYSEAKLAFFIYLWYPKTRGTTYVYESFFRPYLSQHENDIDHSLLELRTRAGDMAVIYWQRVASYGQTRILEILQYVAAQSTPRPQPPQKRGGRANQAPAKPKKAPVPQSEPEEVSLSSSSSSSSSENEGNEPTRKVSGPSRPRPTVTSVPAADPKNAGTTQIAQKSVASPIVNPPQSTTQVEPMQIEEVEGEAESGNENPNPEGPKETVMEETIRMTRGRLRKTRSEESR

SEQ ID NO: 32951 - protein, 231 aa, Arabidopsis thaliana
  misc_feature (1)..(231): Ceres Seq. ID no. 13601563
MYSEAKLAFFIYLWYPKTRGTTYVYESFFRPYLSQHENDIDHSLLELRTRAGDMAVIYWQRVASYGQTRILEILQYVAAQSTPRPQPPQKRGGRANQAPAKPKKAPVPQSEPEEVSLSSSSSSSSSENEGNEPTRKVSGPSRPRPTVTSVPAADPKNAGTTQIAQKSVASPIVNPPQSTTQVEPMQIEEVEGEAESGNENPNPEGPKETVMEETIRMTRGRLRKTRSEESR

SEQ ID NO: 32952 - DNA, 890 bp, Arabidopsis thaliana
  misc_feature (1)..(890): Ceres Seq. ID no. 13601564
attgaccgacacaacaaacaacacgttctctctcatttttcttcttctccgatcaatctagggtttactctcaccggcgacgaacaatgatccacctcctttacacagtgatcttcgccgaaatggcactgatccttctcctcctcttcaaaactcctctccgaaagctaatcatcctcaccttcgatcgaatcaaacgtggccgtggtcccgtcgtcgtcaaaaccataggaaccaccgtattcgtcgttctcttgtcgagtatctacagtttggttaatatccaacgccgatctgaagatggtgctgttcttaatcccactgatcaagtccttgcgtctaagcatcttctcgaagcttctcttatggggtttgtgttgtttctctcgcttatgattgatagactacaccattacattagagagcttcgtttgttgaggaagacaatggagactgcaaagaagcagaacagaggttttgaggatgggaaaaccacaagtggggaggaagtgaaagcgctcggggaagagatcgcggcgttaaaagcgaagataaagacgttagaatcggagagtgaaagtaaaggcaaagaattgaaaggtgcacaaggtgaaacagaggctttgagaaagcaagctgatgggtttcttatggagtatgataggttgcttgaggataatcagaatttgaggaaccagttggagtctattgggcatagtcctgagggaaagaagggtatgtaagagtaaaaactaaggattctgttttgtagagaacaaagtaactataggaaatgtggttttactgatttttgcttcatgtaatatgcaatatcgtctcctcttttgaatgtattttactattatattgcaatctagtaagtttggaac

SEQ ID NO: 32953 - protein, 218 aa, Arabidopsis thaliana
  misc_feature (1)..(218): Ceres Seq. ID no. 13601565
MIHLLYTVIFAEMALILLLLFKTPLRKLIILTFDRIKRGRGPVVVKTIGTTVFVVLLSSIYSLVNIQRRSEDGAVLNPTDQVLASKHLLEASLMGFVLFLSLMIDRLHHYIRELRLLRKTMETAKKQNRGFEDGKTTSGEEVKALGEEIAALKAKIKTLESESESKGKELKGAQGETEALRKQADGFLMEYDRLLEDNQNLRNQLESIGHSPEGKKGM

SEQ ID NO: 32954 - protein, 206 aa, Arabidopsis thaliana
  misc_feature (1)..(206): Ceres Seq. ID no. 13601566
MALILLLLFKTPLRKLIILTFDRIKRGRGPVVVKTIGTTVFVVLLSSIYSLVNIQRRSEDGAVLNPTDQVLASKHLLEASLMGFVLFLSLMIDRLHHYIRELRLLRKTMETAKKQNRGFEDGKTTSGEEVKALGEEIAALKAKIKTLESESESKGKELKGAQGETEALRKQADGFLMEYDRLLEDNQNLRNQLESIGHSPEGKKGM

SEQ ID NO: 32955 - protein, 125 aa, Arabidopsis thaliana
  misc_feature (1)..(125): Ceres Seq. ID no. 13601567
MGFVLFLSLMIDRLHHYIRELRLLRKTMETAKKQNRGFEDGKTTSGEEVKALGEEIAALKAKIKTLESESESKGKELKGAQGETEALRKQADGFLMEYDRLLEDNQNLRNQLESIGHSPEGKKGM

SEQ ID NO: 32956 - DNA, 1080 bp, Arabidopsis thaliana
  misc_feature (1)..(1080): Ceres Seq. ID no. 13601587
ggcttgaaggaaaagaaaagttttgtttctgaactttcgtctctataaaccctttcgacgacgagtgaagaagaaagcgagacgaagaagcaaagatgttcagaaaccaatacgacacagatgttacgacatggagtccaacaggtcgtttattccaagtggaatacgccatggaagcagtgaagcaaggatctgcagcaattggactcagatctcgttctcatgtcgttctcgcttgtgttaacaaagctcaatcggagctttcttcgcatcagaggaagatctttaaagtcgatgaccatatcggtgttgcaatcgctggtctcacagccgacggtcgtgtattgtctcggtatatgagatcggaatcgattaatcactcttttacttatgagtctcctcttcctgttggtcgtctcgttgttcatcttgctgataaagctcaggtctgtacccaacgatcatggaaacgaccctatggtgttggtttgctggtaggtggattggatgagtctggagcccacctttactacaactgtcccagcggaaactacttcgagtaccaagcttttgctattggatcccgttcccaagcagcaaagacctatctggaacgcaggtttgagagctttggggattcttctagagaagatctgatcaaagatgctattttggctgttagggagacattgcaaggggaaacactgaagagttctctctgcacagtcgctattctaggagtcgatgaaccgttccacttcctggaccaggaagcaatacagaaagtgatcgacacatttgagaaagtgccagaggaagaggaaggagaaggcgaggctggtgagggtgaggccgaagctgccgaggctgcaccagcagaacgaggtggtggtgttgcaggtgaccaagacgtggctccaatggaaatgtaaggcttgtgtgtgtaacgctggaactattttatttcgatgttagttggatttttactttgcaaaatggctgcgggtttagattatatgcttgagaagttgaaaccatttcgtcatttaaactcaatagctgccatcaagactttctcgt

SEQ ID NO: 32957 - protein, 278 aa, Arabidopsis thaliana
  misc_feature (1)..(278): Ceres Seq. ID no. 13601588
MFRNQYDTDVTTWSPTGRLFQVEYAMEAVKQGSAAIGLRSRSHVVLACVNKAQSELSSHQRKIFKVDDHIGVAIAGLTADGRVLSRYMRSESINHSFTYESPLPVGRLVVHLADKAQVCTQRSWKRPYGVGLLVGGLDESGAHLYYNCPSGNYFEYQAFAIGSRSQAAKTYLERRFESFGDSSREDLIKDAILAVRETLQGETLKSSLCTVAILGVDEPFHFLDQEAIQKVIDTFEKVPEEEEGEGEAGEGEAEAAEAAPAERGGGVAGDQDVAPMEM

SEQ ID NO: 32958 - protein, 253 aa, Arabidopsis thaliana
  misc_feature (1)..(253): Ceres Seq. ID no. 13601589
MEAVKQGSAAIGLRSRSHVVLACVNKAQSELSSHQRKIFKVDDHIGVAIAGLTADGRVLSRYMRSESINHSFTYESPLPVGRLVVHLADKAQVCTQRSWKRPYGVGLLVGGLDESGAHLYYNCPSGNYFEYQAFAIGSRSQAAKTYLERRFESFGDSSREDLIKDAILAVRETLQGETLKSSLCTVAILGVDEPFHFLDQEAIQKVIDTFEKVPEEEEGEGEAGEGEAEAAEAAPAERGGGVAGDQDVAPMEM

SEQ ID NO: 32959 - protein, 191 aa, Arabidopsis thaliana
  misc_feature (1)..(191): Ceres Seq. ID no. 13601590
MRSESINHSFTYESPLPVGRLVVHLADKAQVCTQRSWKRPYGVGLLVGGLDESGAHLYYNCPSGNYFEYQAFAIGSRSQAAKTYLERRFESFGDSSREDLIKDAILAVRETLQGETLKSSLCTVAILGVDEPFHFLDQEAIQKVIDTFEKVPEEEEGEGEAGEGEAEAAEAAPAERGGGVAGDQDVAPMEM

SEQ ID NO: 32960 - DNA, 1364 bp, Arabidopsis thaliana
  misc_feature (1)..(1364): Ceres Seq. ID no. 13601591
attcttccacaatggattcttcatcttcagtaaaaatcgtctcgaaaagcttcgtgaaacccaaaaccttaccagaagaatcaaagcaaccatactatttatctccatgggactacgcaatgctctctgttcagtacatccaaaaaggtcttctctttcacaagccaccacttgactccattgacactcttcttgagaagctaaaagattctctggccgtcacactagtccatttctaccctctcgcgggtcgcctctcatcgttaacaacggaaaaaccgaaatcttactctgttttcgttgattgtaacgatagccctggcgcggggtttatctacgcgacctcagatttatgtataaaagatattgtgggtgctaagtatgtcccttcaattgttcaatctttctttgaccatcacaaagctgtgaatcatgatggacacaccatgagcctcttatctgtccaggtgacagaattggtagatggaattttcataggactgtctatgaaccatgcgatgggagacggtactgcgttctggaagttctttaccgcatggtccgaaatcttccaaggacaagagagcaaccaaaacgatgacttgtgtcttaagaatccacccgtgttgaagcgttacatccctgaaggatacggtcctctattcagccttccatatagtcatccagatgaatttatcagaacctacgaatctccaattctcaaggagagaatgttctgtttctcatcagaaaccataagaatgcttaaaacaagggtcaaccaaatatgcggaacaacctccatctcatctttccaatcgctaaccgcggttatatggagatgcataacaagggcgaggagattacctctcgatcgagaaacaagttgtagagttgctgctgacaacagaggaagaatgtatccaccgcttcacaaggattacttcggaaactgcctctctgctttgagaacggctgcaaaagctggtgaactattggagaatgatcttggatttgctgctttgaaagtgcatcaagcagtagctgaacatacgagcgaaaaggtatctcaaatgattgatcaatggctaaagtctccttatatttaccatattgatcggctatttgaaccgatgagcgttatgatgggaagctcgccgaggtttaataagtatggttgtgaatttgggttgggaaaaggagtgacgcttagaagtggctatgcgcataagttcgatggaaaggtatctgcttacccgggaagagaaggagggggaagtatagatttggaggtatgtcttgttccagagtttatggaagctttggaatcagatgaagagttcatgtcacttgtttctctttga

SEQ ID NO: 32961 - protein, 453 aa, Arabidopsis thaliana
  misc_feature (1)..(453): Ceres Seq. ID no. 13601592
SSTMDSSSSVKIVSKSFVKPKTLPEESKQPYYLSPWDYAMLSVQYIQKGLLFHKPPLDSIDTLLEKLKDSLAVTLVHFYPLAGRLSSLTTEKPKSYSVFVDCNDSPGAGFIYATSDLCIKDIVGAKYVPSIVQSFFDHHKAVNHDGHTMSLLSVQVTELVDGIFIGLSMNHAMGDGTAFWKFFTAWSEIFQGQESNQNDDLCLKNPPVLKRYIPEGYGPLFSLPYSHPDEFIRTYESPILKERMFCFSSETIRMLKTRVNQICGTTSISSFQSLTAVIWRCITRARRLPLDRETSCRVAADNRGRMYPPLHKDYFGNCLSALRTAAKAGELLENDLGFAALKVHQAVAEHTSEKVSQMIDQWLKSPYIYHIDRLFEPMSVMMGSSPRFNKYGCEFGLGKGVTLRSGYAHKFDGKVSAYPGREGGGSIDLEVCLVPEFMEALESDEEFMSLVSL

SEQ ID NO: 32962 - protein, 450 aa, Arabidopsis thaliana
  misc_feature (1)..(450): Ceres Seq. ID no. 13601593
MDSSSSVKIVSKSFVKPKTLPEESKQPYYLSPWDYAMLSVQYIQKGLLFHKPPLDSIDTLLEKLKDSLAVTLVHFYPLAGRLSSLTTEKPKSYSVFVDCNDSPGAGFIYATSDLCIKDIVGAKYVPSIVQSFFDHHKAVNHDGHTMSLLSVQVTELVDGIFIGLSMNHAMGDGTAFWKFFTAWSEIFQGQESNQNDDLCLKNPPVLKRYIPEGYGPLFSLPYSHPDEFIRTYESPILKERMFCFSSETIRMLKTRVNQICGTTSISSFQSLTAVIWRCITRARRLPLDRETSCRVAADNRGRMYPPLHKDYFGNCLSALRTAAKAGELLENDLGFAALKVHQAVAEHTSEKVSQMIDQWLKSPYIYHIDRLFEPMSVMMGSSPRFNKYGCEFGLGKGVTLRSGYAHKFDGKVSAYPGREGGGSIDLEVCLVPEFMEALESDEEFMSLVSL

SEQ ID NO: 32963 - protein, 414 aa, Arabidopsis thaliana
  misc_feature (1)..(414): Ceres Seq. ID no. 13601594
MLSVQYIQKGLLFHKPPLDSIDTLLEKLKDSLAVTLVHFYPLAGRLSSLTTEKPKSYSVFVDCNDSPGAGFIYATSDLCIKDIVGAKYVPSIVQSFFDHHKAVNHDGHTMSLLSVQVTELVDGIFIGLSMNHAMGDGTAFWKFFTAWSEIFQGQESNQNDDLCLKNPPVLKRYIPEGYGPLFSLPYSHPDEFIRTYESPILKERMFCFSSETIRMLKTRVNQICGTTSISSFQSLTAVIWRCITRARRLPLDRETSCRVAADNRGRMYPPLHKDYFGNCLSALRTAAKAGELLENDLGFAALKVHQAVAEHTSEKVSQMIDQWLKSPYIYHIDRLFEPMSVMMGSSPRFNKYGCEFGLGKGVTLRSGYAHKFDGKVSAYPGREGGGSIDLEVCLVPEFMEALESDEEFMSLVSL

SEQ ID NO: 32964 - DNA, 612 bp, Arabidopsis thaliana
  misc_feature (1)..(612): Ceres Seq. ID no. 13601595
agaagaagaagaagaaagatgacgttgaagaaggtggacgcgaatccatcaaccttggaatcgagtttacaagaactgaaatcagacgaaacaagccgtagcaagatcaatttcatactcttcctcgccgacaatgatcccaccaccggtcaaagctggtgtccagactgtgttagagctgaacctgtgatttacaagactctagaggaatttccagaggaggtgaagctaattcgtgcttacgccggagacagaccgacgtggcggactccggcgcatccttggagagttgattctcggtttaaactaaccggagtaccaactcttgttcgttgggatggtgactctgttaaaggacgtcttgaagatcatcaagctcaccttcctcacttgattcttccccttcttgcaccatccacttgatttgatcgatatcgatttctcgggactatcgtgggattgaggatcaaatatcttatatatatttctagttgtgaattgttttccaataaatcctttacaatggtaaaggaaagtttgtttcttcgatgatctttacgatttcgtgctcaatgtagtgttatttctctaataaattacggtgatattagc

SEQ ID NO: 32965 - protein, 140 aa, Arabidopsis thaliana
  misc_feature (1)..(140): Ceres Seq. ID no. 13601596
RRRRRKMTLKKVDANPSTLESSLQELKSDETSRSKINFILFLADNDPTTGQSWCPDCVRAEPVIYKTLEEFPEEVKLIRAYAGDRPTWRTPAHPWRVDSRFKLTGVPTLVRWDGDSVKGRLEDHQAHLPHLILPLLAPST

SEQ ID NO: 32966 - protein, 134 aa, Arabidopsis thaliana
  misc_feature (1)..(134): Ceres Seq. ID no. 13601597
MTLKKVDANPSTLESSLQELKSDETSRSKINFILFLADNDPTTGQSWCPDCVRAEPVIYKTLEEFPEEVKLIRAYAGDRPTWRTPAHPWRVDSRFKLTGVPTLVRWDGDSVKGRLEDHQAHLPHLILPLLAPST

SEQ ID NO: 32967 - DNA, 2821 bp, Arabidopsis thaliana
  misc_feature (1)..(2821): Ceres Seq. ID no. 13601610
aaaattcttcaattctcttctcgtttttttttttttatcaattccaatgatctgtcacgttttagtaattttcactattctcgtttccgccgtcgtcgacgcaacggcgtcgtatgagcccactgatgtctttctcatcaattgcggcgatacctccaacaacatggactacagtggccggaactggacgacggagaatccgaaatttatgtcatcgaatgcagttgacgacgcgtcgttcacttcatctgcgtcataccaagaatcagggattcctcaagtgccgtacttgaaagctaggattttccgatatgatttcacttacagttttccagtctctcccggctggaaattcctccggttatacttttatccgacccgttacggatccgatttcgacgccgttaaatccttcttctccgtcaacgtcaaccgtttcactctcttgcataacttcagtgtaaaagcttccataccggagtcaagttctctaatcaaagagtttatcgttccggttaaccaaactcttgatctcacgttcacgccctctccgaattcattagctttcgttaacggaatcgagattatctccatgcctgaccggttttactcaaagggaggatttgacgacgttgtaagaaacgttggtagggacgttgacttcgagatagacaactccacggctttcgagaccgtttatcgggtaaacgtaggtggaaaagtggtgggcgacgtcggagattcgggaatgttccggcgttggctttccgatgaaggtttcttactcggtattaattcgggagccattccgaatataacaggtgtaaagatcaactacacggataaaactcccgcgtacgttgcgccggaagatgtatacacgacgtgtcgcctgatggggaacaaagacagtcctgagctaaacctgaatttcaacctgacgtggctctttgaagtcgatgccgggtttgcctatatagtgaggcttcatttctgtgagacgcaaccggaagtcaacaaaacgggtgaccgcgtcttctccatcttcttcggatatcaactggccatgcgtgaaatggacgtgtttcggctgagtggtggttttcggctaccgatgtatctagatttcaaggtacttgtcgacgccgacggaactagccagagacctagtcttcgagttgacttgacaccttacaaagaggactatccaacctattacgacgctattttgagtggtgtagagattctcaagctgagtaattctgatggtaatcttgcggggcttaatccaattcctcaactaagtccaccaccacaatctataacgccactaaaaggaaaaggcaagtcatcacatgttttgccaataataattgcagtggttggttctgcagttgcgctagcgttttttgttcttgttgttgtcctcgttgttatgaagagaaagaagaagagcaacgagtctagtgtagataccacgaacaagccttctacgaactcgtcatggggtcctcttctgcacgggacaggctctacaaatacaaaatctgcctcatctcttccatcagatctctgccgtcgattctccatctacgaaatcaaatccgccacaaatgatttcgaggaaaaactaatcataggagtaggcgggtttggttctgtctacaaaggacgaatagacggtggagccacacttgttgcggttaaacggctggaaattacatcgaaccaaggtgctaaagagttcgatacagagctcgagatgctttcaaagcttcgacatgtacacctcgtctctctaatcggatattgcgatgacgacaacgagatggtacttgtctatgagtatatgccacatggtacacttaaagatcatcttttcaggagagacaaggcctctgatcctccattgtcatggaaacgaaggctagagatttgcattggagcagctcgtggattacagtatcttcatactggagccaagtacacgatcatacatagagacatcaaaaccacaaacatacttctcgatgagaacttcgtcgctaaagtatctgactttggtttatcaagagttggtcctactagtgcttctcaaacgcatgtctccaccgtcgttaaaggaacgtttggttacttggatcccgagtactatcgccgtcaaatcttgaccgaaaaatccgacgtgtactcttttggagttgttctgttggaggttttgtgctgtagaccgatcagaatgcaaagtgttccaccggaacaagcagatttgatccgatgggtgaagtcaaatttcaataaaagaaccgttgatcagatcattgactcagatttaaccgctgatatcacttcgacctcgatggagaagttttgtgagatagccattagatgtgttcaagaccgtggtatggaacggccaccgatgaacgacgttgtttgggcgcttgagtttgctcttcagcttcacgagactgctaagaagaagaatgacaacgtggagtctctggatctaatgccaagtggtgaagttggtacgaccacggacggagaagatgacttgtttagtaggactacaggacacgttgggaaatcgaccacgaccgatgactctgttctagttgttggtgatgagaggagtggttcgagttggggagtattttcggagatcaatgaacctaaagcacggtagatttgatggcttggtaaacaagtatcacattctggttagggttgatatatatttgtgtatgtataattgttgaataaacacattattgtatttaaattacattttgatgattatttagcagcttaaatttag

SEQ ID NO: 32968 - protein, 895 aa, Arabidopsis thaliana
  misc_feature (1)..(895): Ceres Seq. ID no. 13601611
KFFNSLLVFFFLSIPMICHVLVIFTILVSAVVDATASYEPTDVFLINCGDTSNNMDYSGRNWTTENPKFMSSNAVDDASFTSSASYQESGIPQVPYLKARIFRYDFTYSFPVSPGWKFLRLYFYPTRYGSDFDAVKSFFSVNVNRFTLLHNFSVKASIPESSSLIKEFIVPVNQTLDLTFTPSPNSLAFVNGIEIISMPDRFYSKGGFDDVVRNVGRDVDFEIDNSTAFETVYRVNVGGKVVGDVGDSGMFRRWLSDEGFLLGINSGAIPNITGVKINYTDKTPAYVAPEDVYTTCRLMGNKDSPELNLNFNLTWLFEVDAGFAYIVRLHFCETQPEVNKTGDRVFSIFFGYQLAMREMDVFRLSGGFRLPMYLDFKVLVDADGTSQRPSLRVDLTPYKEDYPTYYDAILSGVEILKLSNSDGNLAGLNPIPQLSPPPQSITPLKGKGKSSHVLPIIIAVVGSAVALAFFVLVVVLVVMKRKKKSNESSVDTTNKPSTNSSWGPLLHGTGSTNTKSASSLPSDLCRRFSIYEIKSATNDFEEKLIIGVGGFGSVYKGRIDGGATLVAVKRLEITSNQGAKEFDTELEMLSKLRHVHLVSLIGYCDDDNEMVLVYEYMPHGTLKDHLFRRDKASDPPLSWKRRLEICIGAARGLQYLHTGAKYTIIHRDIKTTNILLDENFVAKVSDFGLSRVGPTSASQTHVSTVVKGTFGYLDPEYYRRQILTEKSDVYSFGVVLLEVLCCRPIRMQSVPPEQADLIRWVKSNFNKRTVDQIIDSDLTADITSTSMEKFCEIAIRCVQDRGMERPPMNDVVWALEFALQLHETAKKKNDNVESLDLMPSGEVGTTTDGEDDLFSRTTGHVGKSTTTDDSVLVVGDERSGSSWGVFSEINEPKAR

SEQ ID NO: 32969 - protein, 880 aa, Arabidopsis thaliana
  misc_feature (1)..(880): Ceres Seq. ID no. 13601612
MICHVLVIFTILVSAVVDATASYEPTDVFLINCGDTSNNMDYSGRNWTTENPKFMSSNAVDDASFTSSASYQESGIPQVPYLKARIFRYDFTYSFPVSPGWKFLRLYFYPTRYGSDFDAVKSFFSVNVNRFTLLHNFSVKASIPESSSLIKEFIVPVNQTLDLTFTPSPNSLAFVNGIEIISMPDRFYSKGGFDDVVRNVGRDVDFEIDNSTAFETVYRVNVGGKVVGDVGDSGMFRRWLSDEGFLLGINSGAIPNITGVKINYTDKTPAYVAPEDVYTTCRLMGNKDSPELNLNFNLTWLFEVDAGFAYIVRLHFCETQPEVNKTGDRVFSIFFGYQLAMREMDVFRLSGGFRLPMYLDFKVLVDADGTSQRPSLRVDLTPYKEDYPTYYDAILSGVEILKLSNSDGNLAGLNPIPQLSPPPQSITPLKGKGKSSHVLPIIIAVVGSAVALAFFVLVVVLVVMKRKKKSNESSVDTTNKPSTNSSWGPLLHGTGSTNTKSASSLPSDLCRRFSIYEIKSATNDFEEKLIIGVGGFGSVYKGRIDGGATLVAVKRLEITSNQGAKEFDTELEMLSKLRHVHLVSLIGYCDDDNEMVLVYEYMPHGTLKDHLFRRDKASDPPLSWKRRLEICIGAARGLQYLHTGAKYTIIHRDIKTTNILLDENFVAKVSDFGLSRVGPTSASQTHVSTVVKGTFGYLDPEYYRRQILTEKSDVYSFGVVLLEVLCCRPIRMQSVPPEQADLIRWVKSNFNKRTVDQIIDSDLTADITSTSMEKFCEIAIRCVQDRGMERPPMNDVVWALEFALQLHETAKKKNDNVESLDLMPSGEVGTTTDGEDDLFSRTTGHVGKSTTTDDSVLVVGDERSGSSWGVFSEINEPKAR

SEQ ID NO: 32970 - protein, 841 aa, Arabidopsis thaliana
  misc_feature (1)..(841): Ceres Seq. ID no. 13601613
MDYSGRNWTTENPKFMSSNAVDDASFTSSASYQESGIPQVPYLKARIFRYDFTYSFPVSPGWKFLRLYFYPTRYGSDFDAVKSFFSVNVNRFTLLHNFSVKASIPESSSLIKEFIVPVNQTLDLTFTPSPNSLAFVNGIEIISMPDRFYSKGGFDDVVRNVGRDVDFEIDNSTAFETVYRVNVGGKVVGDVGDSGMFRRWLSDEGFLLGINSGAIPNITGVKINYTDKTPAYVAPEDVYTTCRLMGNKDSPELNLNFNLTWLFEVDAGFAYIVRLHFCETQPEVNKTGDRVFSIFFGYQLAMREMDVFRLSGGFRLPMYLDFKVLVDADGTSQRPSLRVDLTPYKEDYPTYYDAILSGVEILKLSNSDGNLAGLNPIPQLSPPPQSITPLKGKGKSSHVLPIIIAVVGSAVALAFFVLVVVLVVMKRKKKSNESSVDTTNKPSTNSSWGPLLHGTGSTNTKSASSLPSDLCRRFSIYEIKSATNDFEEKLIIGVGGFGSVYKGRIDGGATLVAVKRLEITSNQGAKEFDTELEMLSKLRHVHLVSLIGYCDDDNEMVLVYEYMPHGTLKDHLFRRDKASDPPLSWKRRLEICIGAARGLQYLHTGAKYTIIHRDIKTTNILLDENFVAKVSDFGLSRVGPTSASQTHVSTVVKGTFGYLDPEYYRRQILTEKSDVYSFGVVLLEVLCCRPIRMQSVPPEQADLIRWVKSNFNKRTVDQIIDSDLTADITSTSMEKFCEIAIRCVQDRGMERPPMNDVVWALEFALQLHETAKKKNDNVESLDLMPSGEVGTTTDGEDDLFSRTTGHVGKSTTTDDSVLVVGDERSGSSWGVFSEINEPKAR

SEQ ID NO: 32971 - DNA, 1504 bp, Arabidopsis thaliana
  misc_feature (1)..(1504): Ceres Seq. ID no. 13601614
cttaccacaagattgttggagaaatggtttcatcacttaacatcatcgaagtggcacgagtcaccccttcaaactctgactcggccgagtcactcagtctcccactcacttatttcgaccttatctattataaacttcgcgccgtcgaacgagtcatcttctaccgaatcaccaacgtaactcgccctttctttgactcagtcatcgtcccaaatctcaaaacctctctatcctcatgcctctctcactatctcccactcgctggcaaacttatatgggaaccacttgatcacaaaccaaccattgtctactcccaaaacgacgacgtttcattcagcgtcgccgaaacaaacgctgatttctctagtttatccggcaatgaaccattcccctccaccgagttgtacccgttagtccccgcgttacaaagctccgacgactcggcctccattgtgtcgttccaagtcacgttatttccaaaccaaggattttgcatcggcgtaagtgcacatcatgccgttttagatggaaaaacgacaaccatgtttctcaaatcctgggctcacatatgtaaacatcaagatttttctctaccgcaggatttaatcccaacttacgatcgtacggtcattaaaagtccaacggatagtgaaaacaaagttttgaatgagtggcgctctttcaccaaaatattagctggtggtaaagaacctgccaaccccaagagtttaaagcttaatccatcatttgagattggtcctgacgttgtccgatacactctccagctcacgcgtgaagatatccaaacgcttcgcgagagacttaagagagaagtttcctcctcctcctcctcaacctcatcctcaaaagagcttcgcttgtctacatttgttattgtttactcgtatgtattagtatgcataataagagctcgaggcggggaaccacatagaccggttggatatgcgttttcggtggattgtcgaagcctcatgaatccgccgactccaaattattttggaaattgcatcgctggttgctctagaatgatgctgacggcaaaaatgtttatgggtgaagaaggacttttggctgctgcgacaatggtcagcgattcgatcgaagaatgggacgagagttttgcgtggaagattccggattttgtagcatatgcaactcttccaccagagacacaacttattttagtttcagggtctaaccgatttggagtatacgagttggattttgggtggggtagacctgataaagtgatggttgtgtcgatcagtccaggcaatgggatttccatggcggaaagtagagaccaaaacggcagtgtggagattggcttctcactcaagaagcacgaaatggacacattgattgatttgcttcattgtgaactaactatttaaataaacttttctttacatgaataaaattgattctctaaacaatatctttaaaacgataacaccaacttatctaatcaaattatttttag

SEQ ID NO: 32972 - protein, 470 aa, Arabidopsis thaliana
  misc_feature (1)..(470): Ceres Seq. ID no. 13601615
YHKIVGEMVSSLNIIEVARVTPSNSDSAESLSLPLTYFDLIYYKLRAVERVIFYRITNVTRPFFDSVIVPNLKTSLSSCLSHYLPLAGKLIWEPLDHKPTIVYSQNDDVSFSVAETNADFSSLSGNEPFPSTELYPLVPALQSSDDSASIVSFQVTLFPNQGFCIGVSAHHAVLDGKTTTMFLKSWAHICKHQDFSLPQDLIPTYDRTVIKSPTDSENKVLNEWRSFTKILAGGKEPANPKSLKLNPSFEIGPDVVRYTLQLTREDIQTLRERLKREVSSSSSSTSSSKELRLSTFVIVYSYVLVCIIRARGGEPHRPVGYAFSVDCRSLMNPPTPNYFGNCIAGCSRMMLTAKMFMGEEGLLAAATMVSDSIEEWDESFAWKIPDFVAYATLPPETQLILVSGSNRFGVYELDFGWGRPDKVMVVSISPGNGISMAESRDQNGSVEIGFSLKKHEMDTLIDLLHCELTI

SEQ ID NO: 32973 - protein, 463 aa, Arabidopsis thaliana
  misc_feature (1)..(463): Ceres Seq. ID no. 13601616
MVSSLNIIEVARVTPSNSDSAESLSLPLTYFDLIYYKLRAVERVIFYRITNVTRPFFDSVIVPNLKTSLSSCLSHYLPLAGKLIWEPLDHKPTIVYSQNDDVSFSVAETNADFSSLSGNEPFPSTELYPLVPALQSSDDSASIVSFQVTLFPNQGFCIGVSAHHAVLDGKTTTMFLKSWAHICKHQDFSLPQDLIPTYDRTVIKSPTDSENKVLNEWRSFTKILAGGKEPANPKSLKLNPSFEIGPDVVRYTLQLTREDIQTLRERLKREVSSSSSSTSSSKELRLSTFVIVYSYVLVCIIRARGGEPHRPVGYAFSVDCRSLMNPPTPNYFGNCIAGCSRMMLTAKMFMGEEGLLAAATMVSDSIEEWDESFAWKIPDFVAYATLPPETQLILVSGSNRFGVYELDFGWGRPDKVMVVSISPGNGISMAESRDQNGSVEIGFSLKKHEMDTLIDLLHCELTI

SEQ ID NO: 32974 - protein, 290 aa, Arabidopsis thaliana
  misc_feature (1)..(290): Ceres Seq. ID no. 13601617
MFLKSWAHICKHQDFSLPQDLIPTYDRTVIKSPTDSENKVLNEWRSFTKILAGGKEPANPKSLKLNPSFEIGPDVVRYTLQLTREDIQTLRERLKREVSSSSSSTSSSKELRLSTFVIVYSYVLVCIIRARGGEPHRPVGYAFSVDCRSLMNPPTPNYFGNCIAGCSRMMLTAKMFMGEEGLLAAATMVSDSIEEWDESFAWKIPDFVAYATLPPETQLILVSGSNRFGVYELDFGWGRPDKVMVVSISPGNGISMAESRDQNGSVEIGFSLKKHEMDTLIDLLHCELTI

SEQ ID NO: 32975 - DNA, 1716 bp, Arabidopsis thaliana
  misc_feature (1)..(1716): Ceres Seq. ID no. 13601660
ttttctcagccaacaaacactagtctcttctgatttgtaccctaacgtttactcgacttatctaaagccgtgaacctcgccggaattcttaaagtcgcgatttttccttaacgccgtttgattcccttacggcctttgaggtccaggagatagcaaatttgttggtgagtactgaaaaatggaggaagagaacgaagtagtgaagacgtttgcagagcttggtgtgcgtgaggagcttgttaaagcttgcgagagattgggatggaagaacccttccaaaattcaagccgaagcccttccttttgctcttgaagggaaagatgtaattggacttgcgcaaaccggttctggtaaaaccggagcttttgcaattcctatattgcaagcactacttgagtatgtttatgattctgagcctaagaaaggacgtagaccggatcctgctttcttcgcttgtgttttatctccaactcgagaacttgcaatccagattgctgaacagtttgaagctcttggtgctgatataagtcttaggtgtgctgtgcttgttggaggtatagacaggatgcaacaaactattgctcttgggaaacggcctcatgttattgttgcaacacctggtcgtctttgggatcatatgtctgatacaaaaggcttttctctgaaatcattgaaatatctggttcttgatgaagcagatagactgttgaatgaagattttgagaaatctcttaaccagattttggaagagatccctcttgagcggaaaacatttcttttttcagcgactatgactaaaaaggttcgaaaacttcaaagggcatgtttgaggaatcctgtgaagattgaagctgcctccaaatattccactgtcgatactcttaagcagcagtatcggtttgttgccgctaaatacaaggattgctatctggtatacattctgagtgaaatgcctgaatcaacatctatgattttcacccgaacatgtgatggtactcgctttctggctttggtgcttcggagccttggttttagagctattcctatcagtggtcaaatgactcagtcaaagagactgggagctttaaataagttcaaagcaggggaatgtaatatcttggtttgtaccgatgtggctagtagagggctcgatatcccatcagttgatgtggttatcaattatgatattcccacaaattcaaaggattacatccatagagtaggaagaaccgctcgtgctggacgttctggtgttgggatatcacttgtaaaccagtatgagctcgaatggtatatacaaatagaaaaactcattggcaagaaactacctgaatatcccgctgaggaagatgaagtcttgtcattgttggagagagttgcagaagcgaaaaagctatctgcaatgaatatgaaagaatcaggaggtaggaagagaaggggagaagatgatgaagaaagtgagaggttcttgggaggtaacaaggacagaggcaacaaggaaagaggtggtaacaaagacaagaagtcttctaagaagttcaaacgataaaatagctctgtttttactgttttccgataactcaccaaagttttgaattgaagttttccatatgaactagggaaatttaatccattttgtactcgtaatttgtatgttcttttctttttgctttgtttctcaatgacagattatacaatttaagttgaaagatgttt

SEQ ID NO: 32976 - protein, 456 aa, Arabidopsis thaliana
  misc_feature (1)..(456): Ceres Seq. ID no. 13601661
MEEENEVVKTFAELGVREELVKACERLGWKNPSKIQAEALPFALEGKDVIGLAQTGSGKTGAFAIPILQALLEYVYDSEPKKGRRPDPAFFACVLSPTRELAIQIAEQFEALGADISLRCAVLVGGIDRMQQTIALGKRPHVIVATPGRLWDHMSDTKGFSLKSLKYLVLDEADRLLNEDFEKSLNQILEEIPLERKTFLFSATMTKKVRKLQRACLRNPVKIEAASKYSTVDTLKQQYRFVAAKYKDCYLVYILSEMPESTSMIFTRTCDGTRFLALVLRSLGFRAIPISGQMTQSKRLGALNKFKAGECNILVCTDVASRGLDIPSVDVVINYDIPTNSKDYIHRVGRTARAGRSGVGISLVNQYELEWYIQIEKLIGKKLPEYPAEEDEVLSLLERVAEAKKLSAMNMKESGGRKRRGEDDEESERFLGGNKDRGNKERGGNKDKKSSKKFKR

SEQ ID NO: 32977 - protein, 327 aa, Arabidopsis thaliana
  misc_feature (1)..(327): Ceres Seq. ID no. 13601662
MQQTIALGKRPHVIVATPGRLWDHMSDTKGFSLKSLKYLVLDEADRLLNEDFEKSLNQILEEIPLERKTFLFSATMTKKVRKLQRACLRNPVKIEAASKYSTVDTLKQQYRFVAAKYKDCYLVYILSEMPESTSMIFTRTCDGTRFLALVLRSLGFRAIPISGQMTQSKRLGALNKFKAGECNILVCTDVASRGLDIPSVDVVINYDIPTNSKDYIHRVGRTARAGRSGVGISLVNQYELEWYIQIEKLIGKKLPEYPAEEDEVLSLLERVAEAKKLSAMNMKESGGRKRRGEDDEESERFLGGNKDRGNKERGGNKDKKSSKKFKR

SEQ ID NO: 32978 - protein, 303 aa, Arabidopsis thaliana
  misc_feature (1)..(303): Ceres Seq. ID no. 13601663
MSDTKGFSLKSLKYLVLDEADRLLNEDFEKSLNQILEEIPLERKTFLFSATMTKKVRKLQRACLRNPVKIEAASKYSTVDTLKQQYRFVAAKYKDCYLVYILSEMPESTSMIFTRTCDGTRFLALVLRSLGFRAIPISGQMTQSKRLGALNKFKAGECNILVCTDVASRGLDIPSVDVVINYDIPTNSKDYIHRVGRTARAGRSGVGISLVNQYELEWYIQIEKLIGKKLPEYPAEEDEVLSLLERVAEAKKLSAMNMKESGGRKRRGEDDEESERFLGGNKDRGNKERGGNKDKKSSKKFKR

SEQ ID NO: 32979 - DNA, 2072 bp, Arabidopsis thaliana
  misc_feature (1)..(2072): Ceres Seq. ID no. 13601664
actatctcacggcttttagttttcaccattctgattaaagagaaaccaaacgtttcatttttcaatatctagagagaaagatgcagacttcggtgaccccagatgccatctccaccgttttgtcaaacccatcctttgattcgtcttccgatcgatctgagatcgttgttcaagttgtggatcttaaacctatcggcaatcgctatacatttagtgcaaatgacggaaagacgaaagtcaaagcaatgtttactgcttcactcacacctgaaatcatttctgggaagatccagaacttgggtctaattcgtctcattgatttcactgttaacgacatttcaagcaaatctacaaaatatttccttgtgactaaatgtgaggctgttggttctgtgcttgattctgagattaacttggacagtaagagcggagaggaggaggctcgtgagcccaagaagcagaaactagagcattctcctgtcagtcctctgaatgatgttgtttctactggtatcacattgaaaccgaagcaggaatttgtagccaaatcagcttctcagataatgagtgaacaaaggggaaatgctgcaccagctgcaagaatggccatgactagaagggttcatccacttgtgtcattaaatccatatcaaggaaactggaccatcaaagtccgagttacaaacaagggagtgatgagaaattacaaaaacgctaggggtgaaggatgtgtcttcaatgttgaactaacagatgaagaaggaacacaaattcaagcaacgatgtttaatgatgctgcaaggaagttttttgacagattccagttgggaaaggtttattatatatcaagggggtcactaaaactcgctaacaagcagttcaaaacagttcagaatgattatgagatgacactgaatgaaaattcagaggttgaggaagctagtagcgaagaaatgttcatccctgagacaaaattcaacttcgtacccattgaagagttgggtctgtatgttaatcagaaggaacttattgatcttattggagttgttcaaagtgtatctcctaccatgagtattagaaggagaactgacaatgagatgattcctaagagggatataactttggctgatgagtcaaggaaaactgttgtggtgtccctgtggaatgatcttgcaactggcataggtcaggagctactagacatggctgatcagtcacctgtgattgcaatcaagtctctcaaagttggagattttcaaggtgtttcgttgtctaccatcagcagaagcaatgtggttattaacccggaatcaccagaagctaaaaagttgaaatcttggtttgattctgaaggcaaggaaatatccatgtcttctattggctcagggatgagcccttctgccaaaaatggatctcggtctttgtatactgaccgagtgcttctctctcacatcacaagcaatccatctttattcgaagaaaagcctgtatttttcagcactagggcttacataagcttcatcaaaccagaccaaacaatgtggtaccaagcttgtaagacttgtaacaagaaagtgacagaagcacttgactctggttactggtgtgaaggatgccagagaaagtatgaagaatgcagcttaaggtacataatggcggtgaaagtcaccgactcatctggagaaacttggatttcgtcattcaacgatgaagcagagaagattcttggatgttcagctgatgagctcaacaaactaaaatcagaggaaggtgaagtaaatgaatatcagacaaaactgaaagaggcaacatggtcatctcatgtcttccgggttagtgtcacacagaatgagtataacggtgagaagagacagagggtaactgtaaaaggagtagctcctcttgattttgctgctgaaacaagattgttgcttcaagacatctccaacaagaacaaaacatctcagtagtagcttttacttctttttttttctctattggcctaaaaaagtctcaaaacttttccttgtataatataagcctttctgcaatttataaaattagggttttgc

SEQ ID NO: 32980 - protein, 629 aa, Arabidopsis thaliana
  misc_feature (1)..(629): Ceres Seq. ID no. 13601665
MQTSVTPDAISTVLSNPSFDSSSDRSEIVVQVVDLKPIGNRYTFSANDGKTKVKAMFTASLTPEIISGKIQNLGLIRLIDFTVNDISSKSTKYFLVTKCEAVGSVLDSEINLDSKSGEEEAREPKKQKLEHSPVSPLNDVVSTGITLKPKQEFVAKSASQIMSEQRGNAAPAARMAMTRRVHPLVSLNPYQGNWTIKVRVTNKGVMRNYKNARGEGCVFNVELTDEEGTQIQATMFNDAARKFFDRFQLGKVYYISRGSLKLANKQFKTVQNDYEMTLNENSEVEEASSEEMFIPETKFNFVPIEELGLYVNQKELIDLIGVVQSVSPTMSIRRRTDNEMIPKRDITLADESRKTVVVSLWNDLATGIGQELLDMADQSPVIAIKSLKVGDFQGVSLSTISRSNVVINPESPEAKKLKSWFDSEGKEISMSSIGSGMSPSAKNGSRSLYTDRVLLSHITSNPSLFEEKPVFFSTRAYISFIKPDQTMWYQACKTCNKKVTEALDSGYWCEGCQRKYEECSLRYIMAVKVTDSSGETWISSFNDEAEKILGCSADELNKLKSEEGEVNEYQTKLKEATWSSHVFRVSVTQNEYNGEKRQRVTVKGVAPLDFAAETRLLLQDISNKNKTSQ

SEQ ID NO: 32981 - protein, 574 aa, Arabidopsis thaliana
  misc_feature (1)..(574): Ceres Seq. ID no. 13601666
MFTASLTPEIISGKIQNLGLIRLIDFTVNDISSKSTKYFLVTKCEAVGSVLDSEINLDSKSGEEEAREPKKQKLEHSPVSPLNDVVSTGITLKPKQEFVAKSASQIMSEQRGNAAPAARMAMTRRVHPLVSLNPYQGNWTIKVRVTNKGVMRNYKNARGEGCVFNVELTDEEGTQIQATMFNDAARKFFDRFQLGKVYYISRGSLKLANKQFKTVQNDYEMTLNENSEVEEASSEEMFIPETKFNFVPIEELGLYVNQKELIDLIGVVQSVSPTMSIRRRTDNEMIPKRDITLADESRKTVVVSLWNDLATGIGQELLDMADQSPVIAIKSLKVGDFQGVSLSTISRSNVVINPESPEAKKLKSWFDSEGKEISMSSIGSGMSPSAKNGSRSLYTDRVLLSHITSNPSLFEEKPVFFSTRAYISFIKPDQTMWYQACKTCNKKVTEALDSGYWCEGCQRKYEECSLRYIMAVKVTDSSGETWISSFNDEAEKILGCSADELNKLKSEEGEVNEYQTKLKEATWSSHVFRVSVTQNEYNGEKRQRVTVKGVAPLDFAAETRLLLQDISNKNKTSQ

SEQ ID NO: 32982 - protein, 468 aa, Arabidopsis thaliana
  misc_feature (1)..(468): Ceres Seq. ID no. 13601667
MSEQRGNAAPAARMAMTRRVHPLVSLNPYQGNWTIKVRVTNKGVMRNYKNARGEGCVFNVELTDEEGTQIQATMFNDAARKFFDRFQLGKVYYISRGSLKLANKQFKTVQNDYEMTLNENSEVEEASSEEMFIPETKFNFVPIEELGLYVNQKELIDLIGVVQSVSPTMSIRRRTDNEMIPKRDITLADESRKTVVVSLWNDLATGIGQELLDMADQSPVIAIKSLKVGDFQGVSLSTISRSNVVINPESPEAKKLKSWFDSEGKEISMSSIGSGMSPSAKNGSRSLYTDRVLLSHITSNPSLFEEKPVFFSTRAYISFIKPDQTMWYQACKTCNKKVTEALDSGYWCEGCQRKYEECSLRYIMAVKVTDSSGETWISSFNDEAEKILGCSADELNKLKSEEGEVNEYQTKLKEATWSSHVFRVSVTQNEYNGEKRQRVTVKGVAPLDFAAETRLLLQDISNKNKTSQ

SEQ ID NO: 32983 - DNA, 815 bp, Arabidopsis thaliana
  misc_feature (1)..(815): Ceres Seq. ID no. 13601680
agaatcagccgacgtttcctcttcaccactttcctctgtttctctgtttcgctctctctacaaaatttctccatgaacatacttaacaagctaggtataggatcaagtagacaaaccaacatggatccttctccaatcgcacaagtaatcgacgacgaagctccggcgccgggaaaccagtttactcaattcggcgccggttgtttctggagcgtggaattagcgtaccagagagttccaggagtgactcaaacagaggttggttattctcaagggatcactcacgatccttcttacaaagatgtttgttcaggtaccacgaatcatgccgagattgttcgtgttcaatatgatccaaaagagtgtagttaccagtcgctgcttgatttgttctggtctaagcatgatcccaccactttgaatcggcagggaaatgatgtgggaacccaataccgttcagggatatatttctacaacccggagcaagagaaactagcacgcgagtcactggagcggcaccagcaacaagttgacaggaaggttgtgacagagatcttaccggctaagaaattttatagagctgaggaacatcaccagcaatacttgtctaaaggagggaggtttggtcttaagcaatcaacggaaaaaggctgcaacgacccaatccgctgctacgggtaaaagccttgcttctaaccgaaagcagaggatgcttccacttatctatgatagattatagcaattatcgttgaaaaataaagaagccgaggctacttatgtaacttgttcttgttcataaaactttttaagtgttc

SEQ ID NO: 32984 - protein, 226 aa, Arabidopsis thaliana
  misc_feature (1)..(226): Ceres Seq. ID no. 13601681
RISRRFLFTTFLCFSVSLSLQNFSMNILNKLGIGSSRQTNMDPSPIAQVIDDEAPAPGNQFTQFGAGCFWSVELAYQRVPGVTQTEVGYSQGITHDPSYKDVCSGTTNHAEIVRVQYDPKECSYQSLLDLFWSKHDPTTLNRQGNDVGTQYRSGIYFYNPEQEKLARESLERHQQQVDRKVVTEILPAKKFYRAEEHHQQYLSKGGRFGLKQSTEKGCNDPIRCYG

SEQ ID NO: 32985 - protein, 202 aa, Arabidopsis thaliana
  misc_feature (1)..(202): Ceres Seq. ID no. 13601682
MNILNKLGIGSSRQTNMDPSPIAQVIDDEAPAPGNQFTQFGAGCFWSVELAYQRVPGVTQTEVGYSQGITHDPSYKDVCSGTTNHAEIVRVQYDPKECSYQSLLDLFWSKHDPTTLNRQGNDVGTQYRSGIYFYNPEQEKLARESLERHQQQVDRKVVTEILPAKKFYRAEEHHQQYLSKGGRFGLKQSTEKGCNDPIRCYG

SEQ ID NO: 32986 - protein, 186 aa, Arabidopsis thaliana
  misc_feature (1)..(186): Ceres Seq. ID no. 13601683
MDPSPIAQVIDDEAPAPGNQFTQFGAGCFWSVELAYQRVPGVTQTEVGYSQGITHDPSYKDVCSGTTNHAEIVRVQYDPKECSYQSLLDLFWSKHDPTTLNRQGNDVGTQYRSGIYFYNPEQEKLARESLERHQQQVDRKVVTEILPAKKFYRAEEHHQQYLSKGGRFGLKQSTEKGCNDPIRCYG

SEQ ID NO: 32987 - DNA, 1130 bp, Arabidopsis thaliana
  misc_feature (1)..(1130): Ceres Seq. ID no. 13601688
aatcaacaattacacttattttgctatcgtttgagcatctcaaaaatttctccggggagatttgtttgtatatactcttccacaaagaagatgctcaaggtccctgaacaccaagttgctggtcacattgctagtgatgggaagctcggtccactcgtagatgaccaaggccggttcttcaagccacttcagggagattctcgtggcgaacacgaggctaagttctatgagtctttcacatcgaacatgaaggttccagatcacatccatagatacttcccggtgtatcacggcactcagctagttgaagcatctgatggatctggcaagcttcctcatcttgttcttgatgatgttgtttcagggtacgcaaacccgtcggtaatggatgttaagattggatctaggacatggtacccggatgtatcagaagaatacttcaagaaatgtattaagaaagatagacagaccaccacggtttcgttggggttcagggtttcaggttttaagatttttgatcaccaagaatcaagtttttggagagctgagaagaagcttgttcttgggtataatgcagatggtgctagattggctctgaggaagtttgtgtcatcgaactctcccgctgactctaacttgacaccaaactgtgcttttgcatcagaggtttatggcggttgtaacgggatcttagcgcagttgttggagcttaaagattggttcgaaacccaaacgctttaccatttcaattcctgctcgattctgatgatttacgagaatgaatcaatcttgatgcaaggaggagatgatgcaccggcaccacgggcacaagtgaagctggtggatttcgcgcatgttcttgatggaaacggtgtcatcgaccataatttcttgggtggactctgctctttcataaagttcatcaaagatattcttcagagcgttgaaaagcacgatgaaaccgatacttccctacttgagaacgggcgctagagaaacgtcgttcttcccggctccatttcaaataatctccaagtttttcctttcttggactagttgggttttggacatgaacgtttgtccctttcaattgtataatttcgttaactaaaccattgtactttctcatt

SEQ ID NO: 32988 - protein, 330 aa, Arabidopsis thaliana
  misc_feature (1)..(330): Ceres Seq. ID no. 13601689
NQQLHLFCYRLSISKISPGRFVCIYSSTKKMLKVPEHQVAGHIASDGKLGPLVDDQGRFFKPLQGDSRGEHEAKFYESFTSNMKVPDHIHRYFPVYHGTQLVEASDGSGKLPHLVLDDVVSGYANPSVMDVKIGSRTWYPDVSEEYFKKCIKKDRQTTTVSLGFRVSGFKIFDHQESSFWRAEKKLVLGYNADGARLALRKFVSSNSPADSNLTPNCAFASEVYGGCNGILAQLLELKDWFETQTLYHFNSCSILMIYENESILMQGGDDAPAPRAQVKLVDFAHVLDGNGVIDHNFLGGLCSFIKFIKDILQSVEKHDETDTSLLENGR

SEQ ID NO: 32989 - protein, 300 aa, Arabidopsis thaliana
  misc_feature (1)..(300): Ceres Seq. ID no. 13601690
MLKVPEHQVAGHIASDGKLGPLVDDQGRFFKPLQGDSRGEHEAKFYESFTSNMKVPDHIHRYFPVYHGTQLVEASDGSGKLPHLVLDDVVSGYANPSVMDVKIGSRTWYPDVSEEYFKKCIKKDRQTTTVSLGFRVSGFKIFDHQESSFWRAEKKLVLGYNADGARLALRKFVSSNSPADSNLTPNCAFASEVYGGCNGILAQLLELKDWFETQTLYHFNSCSILMIYENESILMQGGDDAPAPRAQVKLVDFAHVLDGNGVIDHNFLGGLCSFIKFIKDILQSVEKHDETDTSLLENGR

SEQ ID NO: 32990 - protein, 248 aa, Arabidopsis thaliana
  misc_feature (1)..(248): Ceres Seq. ID no. 13601691
MKVPDHIHRYFPVYHGTQLVEASDGSGKLPHLVLDDVVSGYANPSVMDVKIGSRTWYPDVSEEYFKKCIKKDRQTTTVSLGFRVSGFKIFDHQESSFWRAEKKLVLGYNADGARLALRKFVSSNSPADSNLTPNCAFASEVYGGCNGILAQLLELKDWFETQTLYHFNSCSILMIYENESILMQGGDDAPAPRAQVKLVDFAHVLDGNGVIDHNFLGGLCSFIKFIKDILQSVEKHDETDTSLLENGR

SEQ ID NO: 32991 - DNA, 1166 bp, Arabidopsis thaliana
  misc_feature (1)..(1166): Ceres Seq. ID no. 13601692
acacccaaacacgcgacgcgagcgaagaagacgatgacgaacaaggagaaagctcgagagagaagggagaaaagaatgcaggagatctctctccttcgaactattccttactctgaccaccataggtggtggtcttgtgaaaatgtagcagtagtgactggttcaaaccgcgggattggattcgagattgcaagacagcttgcggttcacggattgacggttgttcttacagctagaaacgtgaatgctggtcttgaagcagttaaatctttgaggcaccaagaagaaggtctcaaggtttattttcatcaacttgatgtcacagactcttcgtcgattagagagtttggttgctggcttaagcaaacatttggaggtttagatattctcgtgaataatgcaggtgttaactacaatctcggctcagataatacggttgaatttgctgaaacagttatatctactaactaccaaggaaccaaaaacatgacaaaagctatgatacccttgatgagaccatctcctcatggcgctcgtgtagtcaatgttagttctcggctaggtagagtaaatggaagacgtaatagactggcaaatgtagagttgagagatcagctaagcagtccagatttgctgaccgaggaacttatagacagaactgtctctaaattcatcaaccaagtaaaagacggaacttgggaatcaggcgggtggcctcagacattcactgactactccatgtctaagcttgcagtcaatgcttacacgagactaatggcaaaagaacttgagagacgaggagaggaagagaagatttatgttaacagcttttgccctggttgggtgaagactgcgatgactggctacgccggaaatatgccacctgaagatgcagctgatactggagtttggcttagcctggtcctttccgaagaggcagtaaccggaaaattcttcgcagagagacgtgagatcaacttctgagggttgttgaatgtttgtaaacgttggaatagattgtgtcgtcttcgtttagtgccatagttttagtcaaaggtttacaaaatcaattgtaattggtaagtgaatggttgtagtcatgatacgcgtcagatttgccacaaaactaggagtttataatttaaatataattaatttttaattgc

SEQ ID NO: 32992 - protein, 327 aa, Arabidopsis thaliana
  misc_feature (1)..(327): Ceres Seq. ID no. 13601693
TPKHATRAKKTMTNKEKARERREKRMQEISLLRTIPYSDHHRWWSCENVAVVTGSNRGIGFEIARQLAVHGLTVVLTARNVNAGLEAVKSLRHQEEGLKVYFHQLDVTDSSSIREFGCWLKQTFGGLDILVNNAGVNYNLGSDNTVEFAETVISTNYQGTKNMTKAMIPLMRPSPHGARVVNVSSRLGRVNGRRNRLANVELRDQLSSPDLLTEELIDRTVSKFINQVKDGTWESGGWPQTFTDYSMSKLAVNAYTRLMAKELERRGEEEKIYVNSFCPGWVKTAMTGYAGNMPPEDAADTGVWLSLVLSEEAVTGKFFAERREINF

SEQ ID NO: 32993 - protein, 316 aa, Arabidopsis thaliana
  misc_feature (1)..(316): Ceres Seq. ID no. 13601694
MTNKEKARERREKRMQEISLLRTIPYSDHHRWWSCENVAVVTGSNRGIGFEIARQLAVHGLTVVLTARNVNAGLEAVKSLRHQEEGLKVYFHQLDVTDSSSIREFGCWLKQTFGGLDILVNNAGVNYNLGSDNTVEFAETVISTNYQGTKNMTKAMIPLMRPSPHGARVVNVSSRLGRVNGRRNRLANVELRDQLSSPDLLTEELIDRTVSKFINQVKDGTWESGGWPQTFTDYSMSKLAVNAYTRLMAKELERRGEEEKIYVNSFCPGWVKTAMTGYAGNMPPEDAADTGVWLSLVLSEEAVTGKFFAERREINF

SEQ ID NO: 32994 - protein, 302 aa, Arabidopsis thaliana
  misc_feature (1)..(302): Ceres Seq. ID no. 13601695
MQEISLLRTIPYSDHHRWWSCENVAVVTGSNRGIGFEIARQLAVHGLTVVLTARNVNAGLEAVKSLRHQEEGLKVYFHQLDVTDSSSIREFGCWLKQTFGGLDILVNNAGVNYNLGSDNTVEFAETVISTNYQGTKNMTKAMIPLMRPSPHGARVVNVSSRLGRVNGRRNRLANVELRDQLSSPDLLTEELIDRTVSKFINQVKDGTWESGGWPQTFTDYSMSKLAVNAYTRLMAKELERRGEEEKIYVNSFCPGWVKTAMTGYAGNMPPEDAADTGVWLSLVLSEEAVTGKFFAERREINF

SEQ ID NO: 32995 - DNA, 1669 bp, Arabidopsis thaliana
  misc_feature (1)..(1669): Ceres Seq. ID no. 13601696
atcttcaaatgaaaatcgctgggctctcgctgtcaacgctgggcgtgagtgagatctaacaatcggtagcgaattttgtaaattttgttccggttttgaagtctcaatctcggggttccggttttagcaactacttcttctgacatttcagctgttctagttgatctttatatactttatatgatctgggattttgaagagtttttagggaggaaccaaaatttctgagagagaaaaatgaagttatcgagctgcgttttgatcttccttctatgtaacacattctcctcgatttctgctttccgtctgagtcggagtcaaccaactgagcgaatttcaggtagtgctggtgatgtgttggaagatgatcccgtgggaagactgaaagtctttgtttatgagcttccaagtaaatacaacaagaagatacttcagaaggatccgagatgtctaaaccacatgtttgctgctgagatatatatgcaacggtttcttttatctagcccagttcgaacacttaatcccgaggaagctgattggttctacgtacctgtgtacaccacttgtgatctcacgcctaatgggcttcctcttccttttaaatctccacgaatgatgagaagtgccattcagcttattgcttccaattggccatactggaatcgcacagaaggagcagaccacttctttgttgtgcctcatgactttggagcctgtttccattatcaagaagagaaggcaataggaagaggaatactacccttgcttcaacgagctacactggtgcagacatttggacaaaggaatcatgtttgcttgaaagaaggttcaatcactgttcctccatatgctccaccacagaagatgcagtcacacttaattcccgaaaaaactcctcgatccatcttcgtttatttcagaggattgttttatgatgtgggaaatgaccctgagggtggttattatgcgaggggtgcaagagcagctgtatgggaaaacttcaaagacaatccgctgtttgacatctcaacagagcacccaacaacatattatgaggacatgcagagagcaatcttctgcctatgcccacttggatgggccccatggagtccaagactggtggaagcagtgatattcggttgcatccctgtgatcatagcagacgacatcgtgttaccttttgcagatgcaatcccttgggaagatattggtgtgtttgtggatgagaaagatgtcccttacctggacacaatactcacatcgatcccaccagaggttatactgagaaaacagaggttgttggcaaacccgtcgatgaaacaagccatgctgttcccgcaaccggctcaaccaggggatgcgtttcatcaagtattgaatgggttggctcgtaagctgcctcatgagaggagtgtgtatctgagaccaggtgagaagctgttgaactggacggcaggaccggtcgctgatctgaaaccttggtaaggaccagtgttggaatttgattgaatgagctattgtttggttggtttctgtcttctcgtgtctgtattttgtagaatcataacttttttttgctatgtagaagggaaaaagctttgtcattgtaatgtaactagaatccttttgacatctcacgagaaagacaagtaaaagaaaaattattgtt

SEQ ID NO: 32996 - protein, 415 aa, Arabidopsis thaliana
  misc_feature (1)..(415): Ceres Seq. ID no. 13601697
MKLSSCVLIFLLCNTFSSISAFRLSRSQPTERISGSAGDVLEDDPVGRLKVFVYELPSKYNKKILQKDPRCLNHMFAAEIYMQRFLLSSPVRTLNPEEADWFYVPVYTTCDLTPNGLPLPFKSPRMMRSAIQLIASNWPYWNRTEGADHFFVVPHDFGACFHYQEEKAIGRGILPLLQRATLVQTFGQRNHVCLKEGSITVPPYAPPQKMQSHLIPEKTPRSIFVYFRGLFYDVGNDPEGGYYARGARAAVWENFKDNPLFDISTEHPTTYYEDMQRAIFCLCPLGWAPWSPRLVEAVIFGCIPVIIADDIVLPFADAIPWEDIGVFVDEKDVPYLDTILTSIPPEVILRKQRLLANPSMKQAMLFPQPAQPGDAFHQVLNGLARKLPHERSVYLRPGEKLLNWTAGPVADLKPW

SEQ ID NO: 32997 - protein, 341 aa, Arabidopsis thaliana
  misc_feature (1)..(341): Ceres Seq. ID no. 13601698
MFAAEIYMQRFLLSSPVRTLNPEEADWFYVPVYTTCDLTPNGLPLPFKSPRMMRSAIQLIASNWPYWNRTEGADHFFVVPHDFGACFHYQEEKAIGRGILPLLQRATLVQTFGQRNHVCLKEGSITVPPYAPPQKMQSHLIPEKTPRSIFVYFRGLFYDVGNDPEGGYYARGARAAVWENFKDNPLFDISTEHPTTYYEDMQRAIFCLCPLGWAPWSPRLVEAVIFGCIPVIIADDIVLPFADAIPWEDIGVFVDEKDVPYLDTILTSIPPEVILRKQRLLANPSMKQAMLFPQPAQPGDAFHQVLNGLARKLPHERSVYLRPGEKLLNWTAGPVADLKPW

SEQ ID NO: 32998 - protein, 334 aa, Arabidopsis thaliana
  misc_feature (1)..(334): Ceres Seq. ID no. 13601699
MQRFLLSSPVRTLNPEEADWFYVPVYTTCDLTPNGLPLPFKSPRMMRSAIQLIASNWPYWNRTEGADHFFVVPHDFGACFHYQEEKAIGRGILPLLQRATLVQTFGQRNHVCLKEGSITVPPYAPPQKMQSHLIPEKTPRSIFVYFRGLFYDVGNDPEGGYYARGARAAVWENFKDNPLFDISTEHPTTYYEDMQRAIFCLCPLGWAPWSPRLVEAVIFGCIPVIIADDIVLPFADAIPWEDIGVFVDEKDVPYLDTILTSIPPEVILRKQRLLANPSMKQAMLFPQPAQPGDAFHQVLNGLARKLPHERSVYLRPGEKLLNWTAGPVADLKPW

SEQ ID NO: 32999 - DNA, 1668 bp, Arabidopsis thaliana
  misc_feature (1)..(1668): Ceres Seq. ID no. 13601704
gatctcataacttagccattctaaaacccattcaccgtctctgtttcgttcgccgtgattcatagtcgtctcgtctcaccgtcaccatcaccgtcttcttcttccattgacaggatcttgtttagattctgcaatggctttcaggcaaactttatctataaggtccaggcttttcgctcgtcgtaaccaaccagtttatcatattatccctcgtgagagtgatcatgaaagggattcattctgtcaagaaacatctcagagaagttaccatagctttcttcaccaaagatccgttaacaattctgatttctccaaagtttctggaggaagcttacatttgcctcttgctcccacgtctggttttgctttctatcgttatatgtcaagtgcacctggtgttggttcagagaagattggtgtgatgtctgacattgcagaagtcataaccgactcaacattgcaagatgtgccagctcaggctgctgctgctgtcagtgaagttacacttgcagctgctgactctttcttccctatcgcggcccttcagcagtgcattgatatggtgcatacattcacaggctttgagtggtgggcatccattgttgtagcaaccattttgatccgatcatcaacagttcctctcttgatcaaacaaatgaaagacacaaccaagttagcgctgatgaggccacggttggagtccatccgggaggaaatgcaaaacaagggaatggactcggttacgatggcagaaggtcaaaaaaagatgaagaatttgtttaaagaatatggtgtcactccattcaccccaatgaaagggatgtttattcagggaccgctgttcatctgctttttccttgctattcgaaatatggcagagaaggtaccttcattccaaacaggaggtgcattatggtttaccgatctaacaactcccgacagcttatacatcttgccggttataacaggattgacattcttgataaccgttgagtgtaatgcacaagaaggcatggaagggaatccgatggctggcactgtaaaaactgtttgtcgggtttttgctctcctcacagtcccgatgacaatgagttttccacaggccatattttgttactggatcacatccaacctgttctctctcatgtatggacttgtgataaagcgtcctcaagtgaagaagatgttacgcatacctgatctgcctccacctcctccaggtcaacaaccttcatttgacctgttttcagctctcaagaaaatgaaagccatgacacaggaccatacacagaaccagatagaaccaccttcgccagtaaacccgaggctttcctcaacatcgctgagtcctgttagtaagaggctcaaggctttggagagccaagtaaagggaaggaagaagaatagcagcaagaagaagtgatttaaaacggtgcatactatttttgttaagagggccaaacgaaaaaaataataaagcttttgagtcgaaagtgaacacagaattttctcactgatgaaactactctgtgagctaaaaagctggaggcagctattgtaagtttgttttgaccaattatagaatagaagattgtttttatagaaacattttggataacatatacttttttatcttgttaagtaacagaacttgaacaacattggatc

SEQ ID NO: 33000 - protein, 429 aa, Arabidopsis thaliana
  misc_feature (1)..(429): Ceres Seq. ID no. 13601705
MAFRQTLSIRSRLFARRNQPVYHIIPRESDHERDSFCQETSQRSYHSFLHQRSVNNSDFSKVSGGSLHLPLAPTSGFAFYRYMSSAPGVGSEKIGVMSDIAEVITDSTLQDVPAQAAAAVSEVTLAAADSFFPIAALQQCIDMVHTFTGFEWWASIVVATILIRSSTVPLLIKQMKDTTKLALMRPRLESIREEMQNKGMDSVTMAEGQKKMKNLFKEYGVTPFTPMKGMFIQGPLFICFFLAIRNMAEKVPSFQTGGALWFTDLTTPDSLYILPVITGLTFLITVECNAQEGMEGNPMAGTVKTVCRVFALLTVPMTMSFPQAIFCYWITSNLFSLMYGLVIKRPQVKKMLRIPDLPPPPPGQQPSFDLFSALKKMKAMTQDHTQNQIEPPSPVNPRLSSTSLSPVSKRLKALESQVKGRKKNSSKKK

SEQ ID NO: 33001 - protein, 347 aa, Arabidopsis thaliana
  misc_feature (1)..(347): Ceres Seq. ID no. 13601706
MSSAPGVGSEKIGVMSDIAEVITDSTLQDVPAQAAAAVSEVTLAAADSFFPIAALQQCIDMVHTFTGFEWWASIVVATILIRSSTVPLLIKQMKDTTKLALMRPRLESIREEMQNKGMDSVTMAEGQKKMKNLFKEYGVTPFTPMKGMFIQGPLFICFFLAIRNMAEKVPSFQTGGALWFTDLTTPDSLYILPVITGLTFLITVECNAQEGMEGNPMAGTVKTVCRVFALLTVPMTMSFPQAIFCYWITSNLFSLMYGLVIKRPQVKKMLRIPDLPPPPPGQQPSFDLFSALKKMKAMTQDHTQNQIEPPSPVNPRLSSTSLSPVSKRLKALESQVKGRKKNSSKKK

SEQ ID NO: 33002 - protein, 333 aa, Arabidopsis thaliana
  misc_feature (1)..(333): Ceres Seq. ID no. 13601707
MSDIAEVITDSTLQDVPAQAAAAVSEVTLAAADSFFPIAALQQCIDMVHTFTGFEWWASIVVATILIRSSTVPLLIKQMKDTTKLALMRPRLESIREEMQNKGMDSVTMAEGQKKMKNLFKEYGVTPFTPMKGMFIQGPLFICFFLAIRNMAEKVPSFQTGGALWFTDLTTPDSLYILPVITGLTFLITVECNAQEGMEGNPMAGTVKTVCRVFALLTVPMTMSFPQAIFCYWITSNLFSLMYGLVIKRPQVKKMLRIPDLPPPPPGQQPSFDLFSALKKMKAMTQDHTQNQIEPPSPVNPRLSSTSLSPVSKRLKALESQVKGRKKNSSKKK

SEQ ID NO: 33003 - DNA, 1120 bp, Arabidopsis thaliana
  misc_feature (1)..(1120): Ceres Seq. ID no. 13601727
aacgttacgagttcttcagtttctcagttctccaaacgacaacttcgagccaaaacaatggcggctactacattgtacaattcctgtcttcttcaaccgaagtatggcttcaccactcgccgcctaaaccagtctctcgttaactctcttacgaacccaacaagagtttcggttttgtggaagagtcgtagagatgttattgcgaaagcttcgattgaaatggcggaatcgaattcgatatcttccgttgttgtcaattcctctggtcctatcatcgtgattgataattacgacagcttcacttacaatctctgccagtatatgggagagctagggtgccattttgaagtttaccgcaatgatgaacttacagttgaggagctgaaaagaaaaaagccaagaggattgttgatttctcctggacctggtacccctcaagactctgggatttccttgcaaactgttttggaactcggaccacttgttcctttatttggagtatgtatgggtttgcagtgtataggagaagcatttggaggaaagattgtgcggtcaccatttggtgttatgcatgggaaaagctcaatggttcactatgatgagaaaggagaagaaggcttgttctctggattatccaaccctttccttgtaggtagatatcacagtctcgtgatcgaaaaagattcatttcctagtgatgaactcgaggttacagcatggacagaagatggtctggttatggctgcccgtcacagaaagtacaagcatatacagggagttcaatttcatccggagagtattataacaaccgaaggcaagacaattgttcgcaatttcatcaaactcgtagagaaaaaggaatctgagaagctggcataggcttagcctgaatgagaaaatcagctgtgttcgattagtgcttccctgtaataatgtctgccaatgcaaaatgttccttggcatcttaccattgtttctacccggaatgtgtctagttctttcagttcaggacgaatctggaaaggctcgatagtattcagtgctgttggaacataacagtacatgagataagatctaatcagatctcactttcttattgtcatactggctttccttggtc

SEQ ID NO: 33004 - protein, 292 aa, Arabidopsis thaliana
  misc_feature (1)..(292): Ceres Seq. ID no. 13601728
NVTSSSVSQFSKRQLRAKTMAATTLYNSCLLQPKYGFTTRRLNQSLVNSLTNPTRVSVLWKSRRDVIAKASIEMAESNSISSVVVNSSGPIIVIDNYDSFTYNLCQYMGELGCHFEVYRNDELTVEELKRKKPRGLLISPGPGTPQDSGISLQTVLELGPLVPLFGVCMGLQCIGEAFGGKIVRSPFGVMHGKSSMVHYDEKGEEGLFSGLSNPFLVGRYHSLVIEKDSFPSDELEVTAWTEDGLVMAARHRKYKHIQGVQFHPESIITTEGKTIVRNFIKLVEKKESEKLA

SEQ ID NO: 33005 - protein, 273 aa, Arabidopsis thaliana
  misc_feature (1)..(273): Ceres Seq. ID no. 13601729
MAATTLYNSCLLQPKYGFTTRRLNQSLVNSLTNPTRVSVLWKSRRDVIAKASIEMAESNSISSVVVNSSGPIIVIDNYDSFTYNLCQYMGELGCHFEVYRNDELTVEELKRKKPRGLLISPGPGTPQDSGISLQTVLELGPLVPLFGVCMGLQCIGEAFGGKIVRSPFGVMHGKSSMVHYDEKGEEGLFSGLSNPFLVGRYHSLVIEKDSFPSDELEVTAWTEDGLVMAARHRKYKHIQGVQFHPESIITTEGKTIVRNFIKLVEKKESEKLA

SEQ ID NO: 33006 - protein, 219 aa, Arabidopsis thaliana
  misc_feature (1)..(219): Ceres Seq. ID no. 13601730
MAESNSISSVVVNSSGPIIVIDNYDSFTYNLCQYMGELGCHFEVYRNDELTVEELKRKKPRGLLISPGPGTPQDSGISLQTVLELGPLVPLFGVCMGLQCIGEAFGGKIVRSPFGVMHGKSSMVHYDEKGEEGLFSGLSNPFLVGRYHSLVIEKDSFPSDELEVTAWTEDGLVMAARHRKYKHIQGVQFHPESIITTEGKTIVRNFIKLVEKKESEKLA

SEQ ID NO: 33007 - DNA, 1498 bp, Arabidopsis thaliana
  misc_feature (1)..(1498): Ceres Seq. ID no. 13601739
ctctcgatttttcttgggaagaagaaactcatgggaattttcaggaattttgtcagccattttctctcatttgagaaaccactaaattagagcttcaaaaaacttctaaaggaatgaatgtttctttgatttccaagagagttttggttcgttgactgagtttagttttggagatctagcaactgaaagctggttaaatacttaaatggacgtagcaggctactgtttgtgaatcctctcgatggcgatgttgtttgtgtggaaaaagtatggcctgtttcagatgtttctctgttgattcaagttttaaacgagagccaagagtcagaaatcaggtcacaggctcgtgaaagctgctttgagtcaaacccatgtcaggtgctcctagagttcagtccatgaatgtggctgaagcagagaccaggtcaactctggggtctactgctaaaaaggctagtcctttcatcacacacaaagctgtatcaaagtcactgcgaaagcttgaaagatcctcatctgggcgtactggatcagatgagaaaacatcttatgctacaccaacagaaactgtgtcttcttcttctcagaagcatactcttaatgcggcttctatactacgacggcatgagcagaacctgaattctaatctgtcacttaatgcatcgttttcatctgatgcctccatggactcgttccacagccgagcatcaactggtcgcttgattaggtcgtacagtgttggaagtagaagtaagtcttacccttccaagccaagaagtgttgtctctgaaggtgctttggattcaccacctaatggttcagagactaagaagaggtgtacttgggtgacaccaaactccgatccatgttatatagttttccatgatgaagaatggggtgtgccagttcacgatgacaagaggttgtttgaactccttgtgctttcgggtgctttggccgaacacacatggcctacgatactgagcaagagacaggctttcagggaagtttttgctgattttgaccccaatgccattgtgaaaatcaatgagaagaagataattggtccaggaagcccggcaagcactttattgtctgatcttaagctaagggcagtcattgagaatgcacgccagatacttaaggtgatagaagaatacggatcatttgacaagtatatatggagttttgtgaagaataaggcgattgtgagcaagttcaggtaccagcgacaagtacctgcaaaaactccaaaagcagaagtgataagtaaagatctagtgagaagagggttccgcagcgtcggaccaacggtggtttactccttcatgcaggcagcagggataacaaacgatcatcttaccagttgtttcaggttccaccattgtatattcgaacatgaaaggtatgtctgaaaagaaggacttcctaaaacttgttaaagtccttttatgttttgtaaagcctccaatttgagtctattattagtattcaaaac

SEQ ID NO: 33008 - protein, 347 aa, Arabidopsis thaliana
  misc_feature (1)..(347): Ceres Seq. ID no. 13601740
MSGAPRVQSMNVAEAETRSTLGSTAKKASPFITHKAVSKSLRKLERSSSGRTGSDEKTSYATPTETVSSSSQKHTLNAASILRRHEQNLNSNLSLNASFSSDASMDSFHSRASTGRLIRSYSVGSRSKSYPSKPRSVVSEGALDSPPNGSETKKRCTWVTPNSDPCYIVFHDEEWGVPVHDDKRLFELLVLSGALAEHTWPTILSKRQAFREVFADFDPNAIVKINEKKIIGPGSPASTLLSDLKLRAVIENARQILKVIEEYGSFDKYIWSFVKNKAIVSKFRYQRQVPAKTPKAEVISKDLVRRGFRSVGPTVVYSFMQAAGITNDHLTSCFRFHHCIFEHERYV

SEQ ID NO: 33009 - protein, 338 aa, Arabidopsis thaliana
  misc_feature (1)..(338): Ceres Seq. ID no. 13601741
MNVAEAETRSTLGSTAKKASPFITHKAVSKSLRKLERSSSGRTGSDEKTSYATPTETVSSSSQKHTLNAASILRRHEQNLNSNLSLNASFSSDASMDSFHSRASTGRLIRSYSVGSRSKSYPSKPRSVVSEGALDSPPNGSETKKRCTWVTPNSDPCYIVFHDEEWGVPVHDDKRLFELLVLSGALAEHTWPTILSKRQAFREVFADFDPNAIVKINEKKIIGPGSPASTLLSDLKLRAVIENARQILKVIEEYGSFDKYIWSFVKNKAIVSKFRYQRQVPAKTPKAEVISKDLVRRGFRSVGPTVVYSFMQAAGITNDHLTSCFRFHHCIFEHERYV

SEQ ID NO: 33010 - protein, 243 aa, Arabidopsis thaliana
  misc_feature (1)..(243): Ceres Seq. ID no. 13601742
MDSFHSRASTGRLIRSYSVGSRSKSYPSKPRSVVSEGALDSPPNGSETKKRCTWVTPNSDPCYIVFHDEEWGVPVHDDKRLFELLVLSGALAEHTWPTILSKRQAFREVFADFDPNAIVKINEKKIIGPGSPASTLLSDLKLRAVIENARQILKVIEEYGSFDKYIWSFVKNKAIVSKFRYQRQVPAKTPKAEVISKDLVRRGFRSVGPTVVYSFMQAAGITNDHLTSCFRFHHCIFEHERYV

SEQ ID NO: 33011 - DNA, 957 bp, Arabidopsis thaliana
  misc_feature (1)..(957): Ceres Seq. ID no. 13601753
ctctttgcaattactctgttttttgcttgtttaaaagtttttgaagaggaagagcaaatcattgattaggaaaatggagaaagcagttcactcgtcgaccacgtctggaccggcggttccaggggagacaacaaagaccggaacctccataattgacactgcagcctccgctgttcaaagttttgcaccggttaaccaaatccaccaacatctctgcgcgttccatttctatgctgacgacatggcacgacaagtagaggctcaccatttctgcagtcacgtgaacgaagagatgcgtcagtgtttgatctacgacggtccggatgcaaacgctcgtctaattggattggagtacatagtgtcagagaagctgttcatgactttgcctgacgaagagaagaagctttggcactcgcacgagtgggaagtgaaaggagggttcttgttcatgcctggtgttccaggtgccattcagcgtaaagatcttgataaagtcgctaagacttatgggaaagttttccatttttggcaagttgatttgggccatgagcttcccattggtttacctaatgtcatgatggctgttacacgcgatggccagcttttccacgagatgattcaggaggcagagaagcggtttggggtatcggtagagggggagagggactcacgggcgtatatgtctggacctgagctcgggatccatccattggcgaatggaggaggcaaagggatgaaactagagctacgagaggtcgatatcaagccggttgagtctgtcggcagcgtctttgtctgagtttacttaaaacctctaataatgccctcaaagcaagcaatgtatgttttggtaaacacaaaacgtacggaactagacaacaagattacttaaaatagtttggattatttctttgtggatcatatttataattagtaataagataagaaataatatct

SEQ ID NO: 33012 - protein, 241 aa, Arabidopsis thaliana
  misc_feature (1)..(241): Ceres Seq. ID no. 13601754
MEKAVHSSTTSGPAVPGETTKTGTSIIDTAASAVQSFAPVNQIHQHLCAFHFYADDMARQVEAHHFCSHVNEEMRQCLIYDGPDANARLIGLEYIVSEKLFMTLPDEEKKLWHSHEWEVKGGFLFMPGVPGAIQRKDLDKVAKTYGKVFHFWQVDLGHELPIGLPNVMMAVTRDGQLFHEMIQEAEKRFGVSVEGERDSRAYMSGPELGIHPLANGGGKGMKLELREVDIKPVESVGSVFV

SEQ ID NO: 33013 - protein, 185 aa, Arabidopsis thaliana
  misc_feature (1)..(185): Ceres Seq. ID no. 13601755
MARQVEAHHFCSHVNEEMRQCLIYDGPDANARLIGLEYIVSEKLFMTLPDEEKKLWHSHEWEVKGGFLFMPGVPGAIQRKDLDKVAKTYGKVFHFWQVDLGHELPIGLPNVMMAVTRDGQLFHEMIQEAEKRFGVSVEGERDSRAYMSGPELGIHPLANGGGKGMKLELREVDIKPVESVGSVFV

SEQ ID NO: 33014 - protein, 168 aa, Arabidopsis thaliana
  misc_feature (1)..(168): Ceres Seq. ID no. 13601756
MRQCLIYDGPDANARLIGLEYIVSEKLFMTLPDEEKKLWHSHEWEVKGGFLFMPGVPGAIQRKDLDKVAKTYGKVFHFWQVDLGHELPIGLPNVMMAVTRDGQLFHEMIQEAEKRFGVSVEGERDSRAYMSGPELGIHPLANGGGKGMKLELREVDIKPVESVGSVFV

SEQ ID NO: 33015 - DNA, 2022 bp, Arabidopsis thaliana
  misc_feature (1)..(2022): Ceres Seq. ID no. 13601765
acagtaacaatctctctctcgcaccttcttaaaagctgctctatttcttcgcttccctcttctcttcactcacaaaacattttgttctaatcccgcaactgctaaaaacaaacccttttgtcaaaaatctctcctttcggtggtgacagaaatctatggcaggaaatggcagaagcagcatacacagtagcatcagacagtgaaaacactggagaggagaaatcatcatcatctccttcattacccgaaatcgcccttggtatcgacattggtacttctcaatgcagtatagctgtttggaacggttctcaagttcacatcttgaggaacacaagaaaccagaagctcatcaaatcatttgtcactttcaaagatgaagttcctgctggtggtgttagcaaccagctcgcacatgagcaggaaatgctaaccggagccgctatcttcaacatgaagcggctcgttggtcgtgtagacactgatcctgtggttcacgctagcaagaaccttcctttcttggttcaaactcttgatattggagttagaccgtttattgcagctttggtgaacaatgcttggagatcaacaacaccagaggaagttttagctatatttctggtggagttacgtctgatggctgaagctcagttgaaacgtcctgtgagaaatgtagtgcttacggttccggtttcgttctctaggttccagctcacacggttcgaaagagcttgcgctatggctggacttcatgttcttcgtttgatgccggaaccaactgctattgcgttgctttatgcgcaacagcagcagatgactacccatgataacatgggaagcggaagcgagaggcttgcggttatattcaatatgggagctggttactgcgatgttgcggttactgctactgctggtggtgtttcacagataaaagctttagctggtagccccattgggggtgaagacattttgcagaacacaattcgccatatcgctccacctaatgaagaagcttcggggttgcttcgtgtagcggcacaggacgcgattcacaggctaacggatcaagaaaatgtccaaattgaagtggatttgggaaatggtaacaagatatccaaggttcttgataggttagagtttgaggaagtgaaccagaaggtatttgaggaatgtgagagacttgttgtgcagtgcctgcgagatgcgagagtcaatggtggtgatatcgatgatttgataatggttggagggtgttcgtacatcccgaaagtaagaactattatcaagaacgtatgcaagaaggatgagatatacaaaggcgtgaatcctttagaagctgcggttagaggagctgctttggaaggtgcggtgacttcagggattcatgatccttttgggagcttagatctgttaaccatacaagccacacctcttgcagttggagtaagagctaacggaaacaaattcatacccgtgattccgcgtaacacaatggttccagcgcggaaagacctcttcttcacaacggttcaagacaaccagaaggaagctctgatcattatatacgaaggagaaggagagactgttgaagagaatcatcttcttggttatttcaagctcgttgggattccgccagcaccgaaaggtgttccagagatcaatgtgtgtatggacattgatgcatcaaatgctttacgggttttcgcagctgtgttgatgccgggatcttcgagtccagtggttcctgtgattgaggtgaggatgcctacggttgatgatggacatggttggtgtgctcaagctttgaatgtgaaatatggagctactcttgatttgattactcttcagagaaagatgtaagattaaaataaaatggtgttggtgatagattttagattagatgtaagatacgaggatgcttcgtatagaaaagagtttgtaaagtttgtgtgtgttttggggtttgtcgttgaagtggtaaacaatgtttatgtgtgtaatgaagtaataatgctttgcagattg

SEQ ID NO: 33016 - protein, 563 aa, Arabidopsis thaliana
  misc_feature (1)..(563): Ceres Seq. ID no. 13601766
MAEAAYTVASDSENTGEEKSSSSPSLPEIALGIDIGTSQCSIAVWNGSQVHILRNTRNQKLIKSFVTFKDEVPAGGVSNQLAHEQEMLTGAAIFNMKRLVGRVDTDPVVHASKNLPFLVQTLDIGVRPFIAALVNNAWRSTTPEEVLAIFLVELRLMAEAQLKRPVRNVVLTVPVSFSRFQLTRFERACAMAGLHVLRLMPEPTAIALLYAQQQQMTTHDNMGSGSERLAVIFNMGAGYCDVAVTATAGGVSQIKALAGSPIGGEDILQNTIRHIAPPNEEASGLLRVAAQDAIHRLTDQENVQIEVDLGNGNKISKVLDRLEFEEVNQKVFEECERLVVQCLRDARVNGGDIDDLIMVGGCSYIPKVRTIIKNVCKKDEIYKGVNPLEAAVRGAALEGAVTSGIHDPFGSLDLLTIQATPLAVGVRANGNKFIPVIPRNTMVPARKDLFFTTVQDNQKEALIIIYEGEGETVEENHLLGYFKLVGIPPAPKGVPEINVCMDIDASNALRVFAAVLMPGSSSPVVPVIEVRMPTVDDGHGWCAQALNVKYGATLDLITLQRKM

SEQ ID NO: 33017 - protein, 477 aa, Arabidopsis thaliana
  misc_feature (1)..(477): Ceres Seq. ID no. 13601767
MLTGAAIFNMKRLVGRVDTDPVVHASKNLPFLVQTLDIGVRPFIAALVNNAWRSTTPEEVLAIFLVELRLMAEAQLKRPVRNVVLTVPVSFSRFQLTRFERACAMAGLHVLRLMPEPTAIALLYAQQQQMTTHDNMGSGSERLAVIFNMGAGYCDVAVTATAGGVSQIKALAGSPIGGEDILQNTIRHIAPPNEEASGLLRVAAQDAIHRLTDQENVQIEVDLGNGNKISKVLDRLEFEEVNQKVFEECERLVVQCLRDARVNGGDIDDLIMVGGCSYIPKVRTIIKNVCKKDEIYKGVNPLEAAVRGAALEGAVTSGIHDPFGSLDLLTIQATPLAVGVRANGNKFIPVIPRNTMVPARKDLFFTTVQDNQKEALIIIYEGEGETVEENHLLGYFKLVGIPPAPKGVPEINVCMDIDASNALRVFAAVLMPGSSSPVVPVIEVRMPTVDDGHGWCAQALNVKYGATLDLITLQRKM

SEQ ID NO: 33018 - protein, 468 aa, Arabidopsis thaliana
  misc_feature (1)..(468): Ceres Seq. ID no. 13601768
MKRLVGRVDTDPVVHASKNLPFLVQTLDIGVRPFIAALVNNAWRSTTPEEVLAIFLVELRLMAEAQLKRPVRNVVLTVPVSFSRFQLTRFERACAMAGLHVLRLMPEPTAIALLYAQQQQMTTHDNMGSGSERLAVIFNMGAGYCDVAVTATAGGVSQIKALAGSPIGGEDILQNTIRHIAPPNEEASGLLRVAAQDAIHRLTDQENVQIEVDLGNGNKISKVLDRLEFEEVNQKVFEECERLVVQCLRDARVNGGDIDDLIMVGGCSYIPKVRTIIKNVCKKDEIYKGVNPLEAAVRGAALEGAVTSGIHDPFGSLDLLTIQATPLAVGVRANGNKFIPVIPRNTMVPARKDLFFTTVQDNQKEALIIIYEGEGETVEENHLLGYFKLVGIPPAPKGVPEINVCMDIDASNALRVFAAVLMPGSSSPVVPVIEVRMPTVDDGHGWCAQALNVKYGATLDLITLQRKM

SEQ ID NO: 33019 - DNA, 1526 bp, Arabidopsis thaliana
  misc_feature (1)..(1526): Ceres Seq. ID no. 13601777
agaggatattcttcgtcacaaaattaaaaaaaaaaagagtaggagaagagggaagcgactagcaccttttgtagttttccgtttattttctgtataaggcgggtgatttcggctccttcatcggaaattatgagcaacgttatcggcgatcgcactgaagacggcctttccaccgccgctgcggcctctggctctacggctgtccagagttctcctcccactgatcgtcctgtccgcgtctacgccgatgggatctacgatcttttccactttggtcatgctcgatctctcgaacaagccaaattagcgtttccaaacaacacttaccttcttgttggatgttgcaatgatgagactacccataagtacaagggaaggactgtaatgactgcagaagagcgatatgaatcacttcgacattgcaagtgggtggatgaagtcatccctgatgcaccatgggtggtcaaccaggagtttcttgacaagcaccagattgactatgttgcccacgattctcttccctatgctgattcaagcggagctggaaaggatgtctatgaatttgttaagaaagttgggaggtttaaggaaacacagcgaactgaaggaatatcgacctcggatataataatgagaatagtgaaagattacaatcagtatgtcatgcgtaacttggatagaggatactcaagggaagatcttggagttagctttgtcaaggaaaagagacttagagttaatatgaggctaaagaaactccaggagagggtcaaagaacaacaagaaagagtgggagaaaagatccaaactgtaaaaatgctgcgcaacgagtgggtagagaatgcagatcgatgggtcgctggatttcttgaaatatttgaagaaggttgccataagatgggaactgcaatcgtagacagtatccaagaaaggttaatgagacaaaagtcggcagagaggctggagaacggtcaggatgatgacacagacgaccagttctatgaagaatacttcgatcatgacatgggtagtgacgatgatgaagatgaaaaattctacgacgaggaagaagtaaaggaagaagagacagagaaaactgttatgacggatgctaaagacaacaagtaagaacaaatttggcttgcagaaacctcagattagctctacttatggccacttctactaaactcccttaagcctcgcactctctctcgaaattcatctacttaacatataataccaatgtttagaaagagagagtgtgtgatgtgtttgtttgtgtgtgttgaacaaacgaacgtgcgtggttgtctttggtgagttggtctcatctttgttgatttttgaatgcgcatgtatttttttcttctttttcatgacgggcaaagtgttatgaagtacaatgcaattgtctaaaacaggataagtcaatggttcgtgtgtgccataaagtaaacatcgctgtgtacatcttccatgttccaaactcaactcgttttcttcaaatattgaaatacaaattggtc

SEQ ID NO: 33020 - protein, 332 aa, Arabidopsis thaliana
  misc_feature (1)..(332): Ceres Seq. ID no. 13601778
MSNVIGDRTEDGLSTAAAASGSTAVQSSPPTDRPVRVYADGIYDLFHFGHARSLEQAKLAFPNNTYLLVGCCNDETTHKYKGRTVMTAEERYESLRHCKWVDEVIPDAPWVVNQEFLDKHQIDYVAHDSLPYADSSGAGKDVYEFVKKVGRFKETQRTEGISTSDIIMRIVKDYNQYVMRNLDRGYSREDLGVSFVKEKRLRVNMRLKKLQERVKEQQERVGEKIQTVKMLRNEWVENADRWVAGFLEIFEEGCHKMGTAIVDSIQERLMRQKSAERLENGQDDDTDDQFYEEYFDHDMGSDDDEDEKFYDEEEVKEEETEKTVMTDAKDNK

SEQ ID NO: 33021 - protein, 247 aa, Arabidopsis thaliana
  misc_feature (1)..(247): Ceres Seq. ID no. 13601779
MTAEERYESLRHCKWVDEVIPDAPWVVNQEFLDKHQIDYVAHDSLPYADSSGAGKDVYEFVKKVGRFKETQRTEGISTSDIIMRIVKDYNQYVMRNLDRGYSREDLGVSFVKEKRLRVNMRLKKLQERVKEQQERVGEKIQTVKMLRNEWVENADRWVAGFLEIFEEGCHKMGTAIVDSIQERLMRQKSAERLENGQDDDTDDQFYEEYFDHDMGSDDDEDEKFYDEEEVKEEETEKTVMTDAKDNK

SEQ ID NO: 33022 - DNA, 930 bp, Arabidopsis thaliana
  misc_feature (1)..(930): Ceres Seq. ID no. 13601780
agatcctcgattccttcgttttctcgcttatcagtgcgatcaatggcggattcagctttcaggaaaattcagatccaaagagatgacactacatttgatgcctatgtggtcggtaaagatgatgcgcctgggattgtggtgattcaagaatggtggggtgttgactttgagatcaagaaccatgctattaaaatctcacaacttgagcctggattcaaagcccttatacctgacttgtatcgaggaaaggttggtttggatactgcagaggcacagcatctaatggatggccttgattggccaggtgctatcaaagatatccgcgcttctgttaattggctaaaatccaatggctcaaaaaaggttggtgtcactggaatgtgcatgggaggtgcattagctatagctagctctgtattggttcctgaggtggatgctgttgttggattctatggaaccccttcctcagagctcgcagatccagcacaagctaaggcacctattcaggctcattttggagagctcgacaattttgtcggtttttctgatgtcacggcagcaaagaatctcgaagagaagctgaaagcgtctggagtagcacatgaagttcacatctatccaggtaatggacacgcgttcttgaacaggagtccagaaggagtgagcagaaggaaaagcatgggactttctgatgaagatgaagccgcagtggagcttgcttggtctcgcttcacctcctggatgaaacagtacttggcttaagctttcttccatcaggcagcaatggttgatgtaagtcccaaaacgttgtgtgatgcccaatcatctttaaataaggacattgctcttagaacttttaatctgaaccaaataaagaggtttgtttacttgtgaatcagtattgagtggaaatgttcgaagccttttttg

SEQ ID NO: 33023 - protein, 253 aa, Arabidopsis thaliana
  misc_feature (1)..(253): Ceres Seq. ID no. 13601781
RSSIPSFSRLSVRSMADSAFRKIQIQRDDTTFDAYVVGKDDAPGIVVIQEWWGVDFEIKNHAIKISQLEPGFKALIPDLYRGKVGLDTAEAQHLMDGLDWPGAIKDIRASVNWLKSNGSKKVGVTGMCMGGALAIASSVLVPEVDAVVGFYGTPSSELADPAQAKAPIQAHFGELDNFVGFSDVTAAKNLEEKLKASGVAHEVHIYPGNGHAFLNRSPEGVSRRKSMGLSDEDEAAVELAWSRFTSWMKQYLA

SEQ ID NO: 33024 - protein, 239 aa, Arabidopsis thaliana
  misc_feature (1)..(239): Ceres Seq. ID no. 13601782
MADSAFRKIQIQRDDTTFDAYVVGKDDAPGIVVIQEWWGVDFEIKNHAIKISQLEPGFKALIPDLYRGKVGLDTAEAQHLMDGLDWPGAIKDIRASVNWLKSNGSKKVGVTGMCMGGALAIASSVLVPEVDAVVGFYGTPSSELADPAQAKAPIQAHFGELDNFVGFSDVTAAKNLEEKLKASGVAHEVHIYPGNGHAFLNRSPEGVSRRKSMGLSDEDEAAVELAWSRFTSWMKQYLA

SEQ ID NO: 33025 - protein, 159 aa, Arabidopsis thaliana
  misc_feature (1)..(159): Ceres Seq. ID no. 13601783
MDGLDWPGAIKDIRASVNWLKSNGSKKVGVTGMCMGGALAIASSVLVPEVDAVVGFYGTPSSELADPAQAKAPIQAHFGELDNFVGFSDVTAAKNLEEKLKASGVAHEVHIYPGNGHAFLNRSPEGVSRRKSMGLSDEDEAAVELAWSRFTSWMKQYLA

SEQ ID NO: 33026 - DNA, 1799 bp, Arabidopsis thaliana
  misc_feature (1)..(1799): Ceres Seq. ID no. 13601804
ttattcaaaatattttcaccaactaaaaaaagatacatcgaaacaaatctctctaatcatatctaagttataacttttctttataaacaataaacaatagctttgatttgaagcaagaggagcaacaatggagatcaccactatcatattcctcatcatatcctctctcaccttctccatcttccttaaactcatcttcttcttctcaactcacaaactcccaccgggaccacctcgttttccggtcatcggaaacatcatctggcttaagaaaaacaacttctccgatttccaaggcgttctccgtgacttagcctcccgtcacggaccaatcataacactccacgtaggctccaaaccttccatctgggtcacagacagatcactcgctcaccaagcccttgtccaaaacggtgccgttttctccgaccgttctctcgctctccctaccaccaaagtcatcaccagcaaccaacacgacatccactcctccgtctatggctctctctggagaaccctccgccgcaacctcacctccgaaatcctccagccctcgcgcgtgaaagcacacgcgccgtcgaggaaatggtctctcgagattctcgtggatctgttcgagacagagcagagagagaaaggacatatctccgacgctttagatcatttacgtcacgctatgttttatttgttggctctgatgtgtttcggagagaaactgagaaaagaagagatcagagagatcgaagaagctcagtaccaaatgctcataagctacaccaagttcagcgtcctcaacatcttcccaagcgtaaccaagttcttgctccggcgaaaatggaaagagtttttagaactaaggaaatctcaagagagcgttatacttcgatacgtgaacgcaagaagcaaagaaaccaccggagatgttctctgttacgtcgatacgctgctgaatcttgagatcccgacggaggagaaagaaggagggaagaagaggaaactgagtgactcggagatcgtgagtctgtgttcggagtttcttaacgcagctacggatccaacggcgacgtcgatgcagtggatcatggcgatcatggtgaagtatccagagatacagaggaaagtatacgaggaaatgaagactgtgttcgccggagaagaagaagaaagagaagagatcagagaagaggatttggggaagttgagttacctcaaagctgtgatcttggagtgtctaagaagacaccctcctggtcattacttgtcttaccataaggtcacacacgacaccgttttgggtggatttctcattccgcgccaaggtactataaactttatggtaggagaaatgggccgggacccaaaaatatgggaagatcctctaacgttcaagccagaaagatttctagagaacggagaagcatgtgattttgatatgacgggaactcgcgagattaaaatgatgccgtttggagcgggacgacggatgtgtcccggctacgcgctttcgttgcttcacctggaatattatgtggccaatttggtttggaaattcgagtggaaatgtgtggaaggtgaagaagttgatctatccgagaagcaacagttcatcacaatggtcatgaaaaaccctttcaaagcaaatatttatccaaggagaaagtgatatttgcttttgtcatattatcaaaaaggcccattgggcttatttgtcgtatgtatattaaaaactttgtctcatatgtattaaaacaatttgggcctttaatgggtttcaatataaagatgtcaacacttttagt

SEQ ID NO: 33027 - protein, 511 aa, Arabidopsis thaliana
  misc_feature (1)..(511): Ceres Seq. ID no. 13601805
MEITTIIFLIISSLTFSIFLKLIFFFSTHKLPPGPPRFPVIGNIIWLKKNNFSDFQGVLRDLASRHGPIITLHVGSKPSIWVTDRSLAHQALVQNGAVFSDRSLALPTTKVITSNQHDIHSSVYGSLWRTLRRNLTSEILQPSRVKAHAPSRKWSLEILVDLFETEQREKGHISDALDHLRHAMFYLLALMCFGEKLRKEEIREIEEAQYQMLISYTKFSVLNIFPSVTKFLLRRKWKEFLELRKSQESVILRYVNARSKETTGDVLCYVDTLLNLEIPTEEKEGGKKRKLSDSEIVSLCSEFLNAATDPTATSMQWIMAIMVKYPEIQRKVYEEMKTVFAGEEEEREEIREEDLGKLSYLKAVILECLRRHPPGHYLSYHKVTHDTVLGGFLIPRQGTINFMVGEMGRDPKIWEDPLTFKPERFLENGEACDFDMTGTREIKMMPFGAGRRMCPGYALSLLHLEYYVANLVWKFEWKCVEGEEVDLSEKQQFITMVMKNPFKANIYPRRK

SEQ ID NO: 33028 - protein, 328 aa, Arabidopsis thaliana
  misc_feature (1)..(328): Ceres Seq. ID no. 13601806
MFYLLALMCFGEKLRKEEIREIEEAQYQMLISYTKFSVLNIFPSVTKFLLRRKWKEFLELRKSQESVILRYVNARSKETTGDVLCYVDTLLNLEIPTEEKEGGKKRKLSDSEIVSLCSEFLNAATDPTATSMQWIMAIMVKYPEIQRKVYEEMKTVFAGEEEEREEIREEDLGKLSYLKAVILECLRRHPPGHYLSYHKVTHDTVLGGFLIPRQGTINFMVGEMGRDPKIWEDPLTFKPERFLENGEACDFDMTGTREIKMMPFGAGRRMCPGYALSLLHLEYYVANLVWKFEWKCVEGEEVDLSEKQQFITMVMKNPFKANIYPRRK

SEQ ID NO: 33029 - protein, 321 aa, Arabidopsis thaliana
  misc_feature (1)..(321): Ceres Seq. ID no. 13601807
MCFGEKLRKEEIREIEEAQYQMLISYTKFSVLNIFPSVTKFLLRRKWKEFLELRKSQESVILRYVNARSKETTGDVLCYVDTLLNLEIPTEEKEGGKKRKLSDSEIVSLCSEFLNAATDPTATSMQWIMAIMVKYPEIQRKVYEEMKTVFAGEEEEREEIREEDLGKLSYLKAVILECLRRHPPGHYLSYHKVTHDTVLGGFLIPRQGTINFMVGEMGRDPKIWEDPLTFKPERFLENGEACDFDMTGTREIKMMPFGAGRRMCPGYALSLLHLEYYVANLVWKFEWKCVEGEEVDLSEKQQFITMVMKNPFKANIYPRRK

SEQ ID NO: 33030 - DNA, 1500 bp, Arabidopsis thaliana
  misc_feature (1)..(1500): Ceres Seq. ID no. 13601808
acgtgtgattctatcttcaaagtatcaaagtatggaccatcaagtgtctctgccacaatctaccaccactggtctttctttcaaggtgcatcgccagcagcgggagctagtcactccggctaaaccaacgccacgagagctcaagcctctctccgacatagacgaccaacaaggactaagatttcaaattccagttatttttttctatagacctaacctttcaagtgatcttgatccggtccaggtgataaagaaagccctcgccgatgcgctggtttactactatccgttcgctggtaggctccgggaactttcaaaccggaaactcgcggtggactgcaccggtgaaggcgttttgttcatcgaggctgaagctgacgtggcgcttgctgagctggaagaggctgatgctcttcttcctccattccctttcctagaagagcttctctttgatgtggaaggctctagtgatgtgcttaacactcctctgcttctcgtccaggtcacgcgattgaaatgctgtggatttatcttcgcactccgcttcaaccataccatgaccgatggagccggcctgtcgctctttctgaaatcactatgcgagttggcgtgtgggcttcacgcaccctcggttccacccgtatggaaccgacacttgttgactgtgagtgcttcggaggcgcgtgtgacccacacacaccgtgagtacgatgatcaggtgggaatcgatgtggtcgccactggacaccctttggttagccggtctttctttttcagagcagaagagatctccgctataaggaaactccttccgcctgatctacacaatacctcatttgaagctttgtcgtcatttttgtggcgttgtcggactattgcgttgaatcctgaccccaacactgagatgcgtctaacttgcatcatcaactcgcgttccaagcttagaaacccaccgctagagcctggttactacggaaatgtgtttgtcattcccgcggcaatagcgacagcaagagatctaatagagaaaccgcttgagtttgctttgaggttgatacaagaaacgaagtcaagtgtaaccgaggactacgtccgttcagtgaccgccctaatggcgactagaggccggcctatgtttgtggcatcagggaactacataatatcggacttgagacattttgatttaggaaaaattgattttggaccgtggggtaagccagtgtacggtggaaccgctaaggccggtatcgcgcttttcccgggagtgagcttctacgtgccgtttaagaataaaaaaggtgagacaggtacagttgtggcgattagcttgccggtacgggcgatggagacgttcgtagcagagctaaatggagtgctaaatgtgtctaaaggatgagagcttagtcgagactcgagacgttattagtaatgtagtaaatagttccttttcttattcgacatcatagtgtagtaactaatatttatatcattgcatctttc

SEQ ID NO: 33031 - protein, 464 aa, Arabidopsis thaliana
  misc_feature (1)..(464): Ceres Seq. ID no. 13601809
RVILSSKYQSMDHQVSLPQSTTTGLSFKVHRQQRELVTPAKPTPRELKPLSDIDDQQGLRFQIPVIFFYRPNLSSDLDPVQVIKKALADALVYYYPFAGRLRELSNRKLAVDCTGEGVLFIEAEADVALAELEEADALLPPFPFLEELLFDVEGSSDVLNTPLLLVQVTRLKCCGFIFALRFNHTMTDGAGLSLFLKSLCELACGLHAPSVPPVWNRHLLTVSASEARVTHTHREYDDQVGIDVVATGHPLVSRSFFFRAEEISAIRKLLPPDLHNTSFEALSSFLWRCRTIALNPDPNTEMRLTCIINSRSKLRNPPLEPGYYGNVFVIPAAIATARDLIEKPLEFALRLIQETKSSVTEDYVRSVTALMATRGRPMFVASGNYIISDLRHFDLGKIDFGPWGKPVYGGTAKAGIALFPGVSFYVPFKNKKGETGTVVAISLPVRAMETFVAELNGVLNVSKG

SEQ ID NO: 33032 - protein, 454 aa, Arabidopsis thaliana
  misc_feature (1)..(454): Ceres Seq. ID no. 13601810
MDHQVSLPQSTTTGLSFKVHRQQRELVTPAKPTPRELKPLSDIDDQQGLRFQIPVIFFYRPNLSSDLDPVQVIKKALADALVYYYPFAGRLRELSNRKLAVDCTGEGVLFIEAEADVALAELEEADALLPPFPFLEELLFDVEGSSDVLNTPLLLVQVTRLKCCGFIFALRFNHTMTDGAGLSLFLKSLCELACGLHAPSVPPVWNRHLLTVSASEARVTHTHREYDDQVGIDVVATGHPLVSRSFFFRAEEISAIRKLLPPDLHNTSFEALSSFLWRCRTIALNPDPNTEMRLTCIINSRSKLRNPPLEPGYYGNVFVIPAAIATARDLIEKPLEFALRLIQETKSSVTEDYVRSVTALMATRGRPMFVASGNYIISDLRHFDLGKIDFGPWGKPVYGGTAKAGIALFPGVSFYVPFKNKKGETGTVVAISLPVRAMETFVAELNGVLNVSKG

SEQ ID NO: 33033 - protein, 279 aa, Arabidopsis thaliana
  misc_feature (1)..(279): Ceres Seq. ID no. 13601811
MTDGAGLSLFLKSLCELACGLHAPSVPPVWNRHLLTVSASEARVTHTHREYDDQVGIDVVATGHPLVSRSFFFRAEEISAIRKLLPPDLHNTSFEALSSFLWRCRTIALNPDPNTEMRLTCIINSRSKLRNPPLEPGYYGNVFVIPAAIATARDLIEKPLEFALRLIQETKSSVTEDYVRSVTALMATRGRPMFVASGNYIISDLRHFDLGKIDFGPWGKPVYGGTAKAGIALFPGVSFYVPFKNKKGETGTVVAISLPVRAMETFVAELNGVLNVSKG

SEQ ID NO: 33034 - DNA, 1124 bp, Arabidopsis thaliana
  misc_feature (1)..(1124): Ceres Seq. ID no. 13601831
acattgcaacactttctacaaaaacaagatgaagattgcaacgttttctgttctactcttgcttttatttattttccccgtggcattagcgcagctgaaatttaagttttacagtgaatcgtgccctaatgcagagactatcgtagaaaacctggttcgccagcagtttgctcgtgacccttcaatcacggccgccttgactcgtatgcattttcacgactgttttgtccagggctgcgacgcttctctcctcatagacccaacgacgtctcaactatcggaaaaaaacgccggcccaaactttagcgtgagagggttcgagctgatcgacgagatcaagacggcactcgaagctcaatgtccctctacggtctcgtgctccgatatagtcacgctcgccacacgtgacgccgtgttcttaggtggaggaccaagctacgtggtccccaccggacgtcgcgatggctttgtgtcgaatcctgaagacgccaatgagatcctccctccaccattcatatccgtcgaaggcatgttaagttttttcggcaacaaaggaatgaatgtttttgattccgtagctcttttgggggcgcacacggttgggatcgcgtcttgtggtaattttgtggaccgggtcacgaactttcaaggaaccggactgcccgacccatccatggaccccactttggctggcaggctaaggaacacatgtgcggttccaggcggcttcgcggcactggaccagtcgatgccagtaacgccggtctcattcgacaacttgttctttggtcagatcagagagaggaaaggaattttgcttattgaccaactgatcgcaagcgacccggccacttctggtgttgtacttcagtacgcgtccaacaacgaactattcaaacgtcagttcgcaatcgcaatggtgaagatgggagccgttgacgtgcttaccggttcagctggtgagatcaggacgaattgtagagcattcaactaaagctttataacaagtttctatatctgattattgattgtttttcccttaatttccgcttctgatgatgaattgtgaatggtgattgtttgcctatatatgtatgtacgtatatctttaaaataaggtttgg

SEQ ID NO: 33035 - protein, 330 aa, Arabidopsis thaliana
  misc_feature (1)..(330): Ceres Seq. ID no. 13601832
HCNTFYKNKMKIATFSVLLLLLFIFPVALAQLKFKFYSESCPNAETIVENLVRQQFARDPSITAALTRMHFHDCFVQGCDASLLIDPTTSQLSEKNAGPNFSVRGFELIDEIKTALEAQCPSTVSCSDIVTLATRDAVFLGGGPSYVVPTGRRDGFVSNPEDANEILPPPFISVEGMLSFFGNKGMNVFDSVALLGAHTVGIASCGNFVDRVTNFQGTGLPDPSMDPTLAGRLRNTCAVPGGFAALDQSMPVTPVSFDNLFFGQIRERKGILLIDQLIASDPATSGVVLQYASNNELFKRQFAIAMVKMGAVDVLTGSAGEIRTNCRAFN

SEQ ID NO: 33036 - protein, 321 aa, Arabidopsis thaliana
  misc_feature (1)..(321): Ceres Seq. ID no. 13601833
MKIATFSVLLLLLFIFPVALAQLKFKFYSESCPNAETIVENLVRQQFARDPSITAALTRMHFHDCFVQGCDASLLIDPTTSQLSEKNAGPNFSVRGFELIDEIKTALEAQCPSTVSCSDIVTLATRDAVFLGGGPSYVVPTGRRDGFVSNPEDANEILPPPFISVEGMLSFFGNKGMNVFDSVALLGAHTVGIASCGNFVDRVTNFQGTGLPDPSMDPTLAGRLRNTCAVPGGFAALDQSMPVTPVSFDNLFFGQIRERKGILLIDQLIASDPATSGVVLQYASNNELFKRQFAIAMVKMGAVDVLTGSAGEIRTNCRAFN

SEQ ID NO: 33037 - protein, 262 aa, Arabidopsis thaliana
  misc_feature (1)..(262): Ceres Seq. ID no. 13601834
MHFHDCFVQGCDASLLIDPTTSQLSEKNAGPNFSVRGFELIDEIKTALEAQCPSTVSCSDIVTLATRDAVFLGGGPSYVVPTGRRDGFVSNPEDANEILPPPFISVEGMLSFFGNKGMNVFDSVALLGAHTVGIASCGNFVDRVTNFQGTGLPDPSMDPTLAGRLRNTCAVPGGFAALDQSMPVTPVSFDNLFFGQIRERKGILLIDQLIASDPATSGVVLQYASNNELFKRQFAIAMVKMGAVDVLTGSAGEIRTNCRAFN

SEQ ID NO: 33038 - DNA, 1005 bp, Arabidopsis thaliana
  misc_feature (1)..(1005): Ceres Seq. ID no. 13601843
agatagagagaaagacgcttctggtcagttttcgttaaacccgccggagaaactagcgactacggtggtcgaacccgtctgacgtcgtagaattcatcgtaatcttcacttcctttcttccccgacaaaatcatcgatctgtgtttgccaatcagattcaccggaacttctagttaggacgattgtgaaaaatgtcgtcatcgttagaacaagaaatcttcttacagtggggaaacaagaagagattgagatgtcttagagccaaagccaaaaagatctctcgttctaaaaactcttctcgctttctaggtcaagataccgtcctccttcaatcctctagattctccagaggatcagaaggagcaatcctcagatctggactaccagatcgccggagaccgtctccggagaaagaggagaggtattatactacgagaggtgtagtggataacattgggaaagattgtttagatggaaacatcaatggagaagatagcaacaacaaggaagagagtatgtggcctaagctctttataacattatcaaacaaagagaaagaagaagatttcatggctatgaaaggttgcaaaccttctcataggcctaagaagagagctaaactcatccaaagaagcttacttttggtgagtcctggaacatggttggctgatttgtgccctgatagatacgatgttagggtgaagaagagctctaagaagaggcgagcaagagggctaaaagccatgggaaacatggagactgattcagattgacaagttttaagattagtttactagaaatgtttgcgtattgatttaagctaactttcgtgggtttccttaagcaatctttaagaatgtattttagatgaaattattcggttgagcactttgaacacaaggatatatcatttctttgtgacaatgtatgtacctgttgtaacttgtaaccctatcctaatctattgtttcagataatgtactttagtcctatttggcggcactt

SEQ ID NO: 33039 - protein, 193 aa, Arabidopsis thaliana
  misc_feature (1)..(193): Ceres Seq. ID no. 13601844
MSSSLEQEIFLQWGNKKRLRCLRAKAKKISRSKNSSRFLGQDTVLLQSSRFSRGSEGAILRSGLPDRRRPSPEKEERYYTTRGVVDNIGKDCLDGNINGEDSNNKEESMWPKLFITLSNKEKEEDFMAMKGCKPSHRPKKRAKLIQRSLLLVSPGTWLADLCPDRYDVRVKKSSKKRRARGLKAMGNMETDSD

SEQ ID NO: 33040 - DNA, 1937 bp, Arabidopsis thaliana
  misc_feature (1)..(1937): Ceres Seq. ID no. 13601856
atgagcagagaaagcttcaagccaatctgtcacattaacttggttgaaccagatgtctcttgcagtatatattgcttcttgagaaacgtagacatctgcttcgcgaattcggagcttccacagcaaaccttccattcatcttctccgatctccatcgccattttttctctcttttctccaatcctcacttctgttgactggtgtaagatcaaaagtcatctaattgggccttttcataaacgggcttttcaaaaatgggccttttctttatcttcttcctttttttattcatcatcttctatatgtgaattattcagaaacagaagcgagaagtttcttacaatttgtaaagagatctgttttagggttttgccttgttcttgtggcgggaataacaaagacatcgccgatatggggaaagacgaagaggaaatgcgaggtgagatcgaggagcgactaatcaatgaagagtacaagatctggaagaagaacactcctttcctctacgatctcgttattactcacgctctcgagtggccttcacttactgttgaatggcttcctgaccgtgaagaaccttccggtaaagactactccgttcagaagatgattctcggtacccatacctccgagagcgagcccaattacttgatgctagcccaagttcagcttcctcttgacgataccgagagtgaagctcgtcagtacgatgatgaccgctctgaatttggtggctttggctgtgcaactggaaaggtacaaattatccagcagataaatcatgatggtgaggttaatcgagctcgctatatgcctcaaaaccctttcataattgctaccaagacagttaatgcggaggtctatgttttcgattacagtaagcatccatctaagcctcctcttgatggggcttgtaatcctgatttaaagcttagaggtcacagctctgagggatatggtctctcttggagtaagttcaagcagggtcatttgcttagtggctctgatgatgctcagatctgcttgtgggatattaacgctactcctaaaaacaaatctctggacgctcagcagatttttaaggctcatgaaggggttgtggaagatgttgcatggcatctgagacatgagtacctgtttggatcagttggagatgaccaataccttctcatatgggatctgcgttctccatctgccagtaaaccagtacagtctgtggttgctcattcgatggaggttaactgcttagccttcaatccatttaatgagtgggttgtggcaacaggatcaactgacaagactgttaaattattcgatctacggaagctaagcaccgctcttcacacatttgatagccacaaagaggaggtttttcaagttggttggaacccaaagaacgagactattttagcttcatgttgccttggtagaagacttatggtttgggaccttagcaggatcgatgaggaacagacagtggaggacgcagaagacggcccacctgagctgctgtttattcacggtggtcacactagcaaaatttcagatttctcgtggaacccttgtgaagattgggttatttccagtgttgctgaggacaacatactccaaatatggcaaatggctgaaaacatctatcatgatgaggatgacgctccaggggaagaaccatcaaaagcttcttagcttgttatttagtatccaaagcgcactgatcttatgggacagtatttatttatacatctctgctattgtttagttcaagtatttagtgttcattgtgtaaaatgaggcatgagaggatggtagcaagtgggaatttttctttataacatgaaggagttgattctaatctcactaagtagtgtcaaccaaagctataactcttagtttatacccagattgggcgacattagaaagaaattacaaatttgaat

SEQ ID NO: 33041 - protein, 561 aa, Arabidopsis thaliana
  misc_feature (1)..(561): Ceres Seq. ID no. 13601857
MSRESFKPICHINLVEPDVSCSIYCFLRNVDICFANSELPQQTFHSSSPISIAIFSLFSPILTSVDWCKIKSHLIGPFHKRAFQKWAFSLSSSFFYSSSSICELFRNRSEKFLTICKEICFRVLPCSCGGNNKDIADMGKDEEEMRGEIEERLINEEYKIWKKNTPFLYDLVITHALEWPSLTVEWLPDREEPSGKDYSVQKMILGTHTSESEPNYLMLAQVQLPLDDTESEARQYDDDRSEFGGFGCATGKVQIIQQINHDGEVNRARYMPQNPFIIATKTVNAEVYVFDYSKHPSKPPLDGACNPDLKLRGHSSEGYGLSWSKFKQGHLLSGSDDAQICLWDINATPKNKSLDAQQIFKAHEGVVEDVAWHLRHEYLFGSVGDDQYLLIWDLRSPSASKPVQSVVAHSMEVNCLAFNPFNEWVVATGSTDKTVKLFDLRKLSTALHTFDSHKEEVFQVGWNPKNETILASCCLGRRLMVWDLSRIDEEQTVEDAEDGPPELLFIHGGHTSKISDFSWNPCEDWVISSVAEDNILQIWQMAENIYHDEDDAPGEEPSKAS

SEQ ID NO: 33042 - protein, 424 aa, Arabidopsis thaliana; identical to SEQ ID NO: 30281
  misc_feature (1)..(424): Ceres Seq. ID no. 13601858

SEQ ID NO: 33043 - protein, 417 aa, Arabidopsis thaliana; identical to SEQ ID NO: 30282
  misc_feature (1)..(417): Ceres Seq. ID no. 13601859

SEQ ID NO: 33044 - DNA, 786 bp, Arabidopsis thaliana
  misc_feature (1)..(786): Ceres Seq. ID no. 13601868
acaagtttgtcggatcaatccattttaactccgatccatgactacgactaggcggaaaaatacacattggtgtcatacttgtagacgaggaatccatcttcaaggagaaggcagaagagaaggagcttgcatttactgtggtaacacctttcttgaaaggctatatgagaatgttgaactaagcccttttgatttattcggattagcctacgaagaagctcgtaaccgtcgcaacaacagaagatcggttataggagaacaactaagttttgaagagttgtttaaccggctcccagcactacaagaccgtcgtggtcctcctccagcatcactagccgcgattaactcattgcaaaagatcaaaatcaggcagaagcatctcggtttagatccctattgtccggtttgccaagaccagtttgaaatcggatcagatgcaagaaaaatgccgtgtaaacatatctaccattctgaatgtatactcccgtggttagtccagcgtaatacttgccccgtctgccgcaaagaacttccacaagaccgaaataatagccggaaaaatccattgtggcatctgtggccgttcaggtcctctggtttggcctcaaaccataatggatcatcacctttccattgagatgctagcttttgaatcaatccatgtgcatgtacgtagtatatgatgatattttatttttccatgataaaatgttgcttttttcaatatattggcatgtacaaaagggttttgtagtcttattaatgtatgaaaaatattgtttatct

SEQ ID NO: 33045 - protein, 199 aa, Arabidopsis thaliana
  misc_feature (1)..(199): Ceres Seq. ID no. 13601869
MTTTRRKNTHWCHTCRRGIHLQGEGRREGACIYCGNTFLERLYENVELSPFDLFGLAYEEARNRRNNRRSVIGEQLSFEELFNRLPALQDRRGPPPASLAAINSLQKIKIRQKHLGLDPYCPVCQDQFEIGSDARKMPCKHIYHSECILPWLVQRNTCPVCRKELPQDRNNSRKNPLWHLWPFRSSGLASNHNGSSPFH

SEQ ID NO: 33046 - DNA, 999 bp, Arabidopsis thaliana
  misc_feature (1)..(999): Ceres Seq. ID no. 13601874
gaggagaaggacgatcgatctaaggagacgatgaagatcttccacgttccttgtctgcaagacaactactcttatctgataatcgatgagagcaccggagacgcggcggttgtggatccagttgatccggagaaggtgatcgcatcggctgagaagcaccaagctaagatcaagttcgtactcactacgcatcatcactgggatcatgccggtggaaacgagaagattaagcagttggttcctgatatcaaagtatatggaggttctctggataaggtgaagggttgcactgatgcggttgataatggtgacaagctgactttgggtcaggatattaacatattggctctccacactccttgtcacaccaagggtcacattagttattatgtgaacggaaaagaaggagaaaacccagccgtgttcaccggagatacactttttgttgctggatgtgggaagttttttgaagggacagctgagcagatgtatcagtcgttgtgtgtgactctggctgcattacctaaaccgacacaggtttactgcggccatgagtacaccgttaagaacttggaatttgctctaactgtggaaccaaacaacgggaagatacaacagaagttagcatgggcccgtcaacagcgccaagcagatcttcccacaatcccttcaacactggaggaagagctcgaaacaaatccatttatgcgtgttgataagccagagatacaggagaaactcggttgcaagtcgccaattgatacaatgagggaagttcggaacaagaaggatcagtggaggggatgatgataaatggagagcttcttgcctatgttttgtgtacttgtgttgaatgatcctgtaaaaggtgtatgaaccagtaatgttgatattctgtgtgaaactgtgaaccggtttggtaaaccgaaatcagaccgacctgtaagccgtactccctttttgaattttcagtttactatggataataatttcagtgtc

SEQ ID NO: 33047 - protein, 268 aa, Arabidopsis thaliana
  misc_feature (1)..(268): Ceres Seq. ID no. 13601875
EEKDDRSKETMKIFHVPCLQDNYSYLIIDESTGDAAVVDPVDPEKVIASAEKHQAKIKFVLTTHHHWDHAGGNEKIKQLVPDIKVYGGSLDKVKGCTDAVDNGDKLTLGQDINILALHTPCHTKGHISYYVNGKEGENPAVFTGDTLFVAGCGKFFEGTAEQMYQSLCVTLAALPKPTQVYCGHEYTVKNLEFALTVEPNNGKIQQKLAWARQQRQADLPTIPSTLEEELETNPFMRVDKPEIQEKLGCKSPIDTMREVRNKKDQWRG

SEQ ID NO: 33048 - protein, 258 aa, Arabidopsis thaliana
  misc_feature (1)..(258): Ceres Seq. ID no. 13601876
MKIFHVPCLQDNYSYLIIDESTGDAAVVDPVDPEKVIASAEKHQAKIKFVLTTHHHWDHAGGNEKIKQLVPDIKVYGGSLDKVKGCTDAVDNGDKLTLGQDINILALHTPCHTKGHISYYVNGKEGENPAVFTGDTLFVAGCGKFFEGTAEQMYQSLCVTLAALPKPTQVYCGHEYTVKNLEFALTVEPNNGKIQQKLAWARQQRQADLPTIPSTLEEELETNPFMRVDKPEIQEKLGCKSPIDTMREVRNKKDQWRG

SEQ ID NO: 33049 - DNA, 1067 bp, Arabidopsis thaliana
  misc_feature (1)..(1067): Ceres Seq. ID no. 13601877
aaagaaatgaagaaagttgactagaaacggagaatttccaaatgttgaatttgttggatgcatgtgaaagccaattctatttggttcctccttgataatccacccaatcgctgtcattctcccatcaatctagctgctttcacaaaccattgtactgagatcgtatctttaaggtaaatttcaaatcggagtcggcgagatcgaaataggaacctggaagtcggagaatttgtgtaaattcggttttttttttttaattctccgatggatagtttaagtgatatcgatggtgatttcgatggaagaaatgaaggaggatcgtcatcggattatcgattgttgggtcggcagattacggttcatcagttcatgggtggtggcaaagctgctgacttgctcttatggaggaggcgacatctttctttgggggttatcattatatcaactgtagcctggcttatattcgagttttccgggttgcctttcttatctgtttcttcggatgtcttactcatcgtgatcatgatatcattcgttcatgcccgggtttctgcttttaggaatagacagttgcattcgttgccagagcttgttctatcagaggaaatggtgaatagtgctgcagcttctttccgtataaaactcaatcacttgcttgtaatggctcatgatgtcacagttggcaacgattttcgactcttcttcaaggtggtgatttgtctgtggcttctctctgccattggtagctatatatctctctgcactcttctttacatcgggaccatcctatctgtaacaataccggctttgtacagtaaatatcaaagcaaagtagacaagtgttgcgggacgattcacaggcggttgtctcaccactacaaaatagtagacgaaaatgttataagcagactctcatggagcttatccaaggataaagattcatgagcttaactttggtgattctgagaatgcttttacttgtttttgtttagcttttcttgttattcaccatttgtagtataactaaacgccatatccagaatgaatataagatggtttctttgttc

SEQ ID NO: 33050 - protein, 226 aa, Arabidopsis thaliana
  misc_feature (1)..(226): Ceres Seq. ID no. 13601878
MDSLSDIDGDFDGRNEGGSSSDYRLLGRQITVHQFMGGGKAADLLLWRRRHLSLGVIIISTVAWLIFEFSGLPFLSVSSDVLLIVIMISFVHARVSAFRNRQLHSLPELVLSEEMVNSAAASFRIKLNHLLVMAHDVTVGNDFRLFFKVVICLWLLSAIGSYISLCTLLYIGTILSVTIPALYSKYQSKVDKCCGTIHRRLSHHYKIVDENVISRLSWSLSKDKDS

SEQ ID NO: 33051 - protein, 191 aa, Arabidopsis thaliana
  misc_feature (1)..(191): Ceres Seq. ID no. 13601879
MGGGKAADLLLWRRRHLSLGVIIISTVAWLIFEFSGLPFLSVSSDVLLIVIMISFVHARVSAFRNRQLHSLPELVLSEEMVNSAAASFRIKLNHLLVMAHDVTVGNDFRLFFKVVICLWLLSAIGSYISLCTLLYIGTILSVTIPALYSKYQSKVDKCCGTIHRRLSHHYKIVDENVISRLSWSLSKDKDS

SEQ ID NO: 33052 - protein, 140 aa, Arabidopsis thaliana
  misc_feature (1)..(140): Ceres Seq. ID no. 13601880
MISFVHARVSAFRNRQLHSLPELVLSEEMVNSAAASFRIKLNHLLVMAHDVTVGNDFRLFFKVVICLWLLSAIGSYISLCTLLYIGTILSVTIPALYSKYQSKVDKCCGTIHRRLSHHYKIVDENVISRLSWSLSKDKDS

SEQ ID NO: 33053 - DNA, 910 bp, Arabidopsis thaliana
  misc_feature (1)..(910): Ceres Seq. ID no. 13601921
ctaaaacaaaaaatctcttaacaacttctccaccttctccccaccaccaccactcaccgtcggagaaagaaaaaaaacaaccaccatgaaagactgtgaaaaccacggccactctcgccggaaactaataaggcgaatattttggtcaataatcttcgtcctcttcatcatcttcctaacaatcctcctcatttgggcaattctccaaccatcaaagccacgcttcatcctccaagacgccaccgtctacgccttcaacgtctccggcaatccaccgaacctcctcacctccaacttccaaatcactctctcttcccggaaccctaacaacaaaatcggcatttactacgaccggcttgacgtctacgctacttaccggagccaacaaatcactttcccaacatcaatccctcccacgtatcagggacacaaagatgtcgacatctggtcgccgtttgtttacggaacctccgttcccatcgctccttttaacggcgttagtcttgacaccgataaagataacggtgtcgttttgttgatcattcgtgctgatggtagagtgaggtggaaggttgggacttttatcaccgggaagtatcatcttcatgtgaagtgtccagcatatataaacttcggtaacaaagctaacggagttatcgtcggagacaacgccgttaagtatacgtttaccactagttgtagtgttagtgtgtgaaacggcgacgaagaaaaataaggtaactaaacgtcttcgttaagtaatctgtcttagtgatgtgaattgtacattttgcttatacgaatagcaaatattacagattcgtgatgttgtaacgaattttaagaatttcaatatgtatactttttttttattatagttgaattctaaattctattataagttgtgatg

SEQ ID NO: 33054 - protein, 209 aa, Arabidopsis thaliana
  misc_feature (1)..(209): Ceres Seq. ID no. 13601922
MKDCENHGHSRRKLIRRIFWSIIFVLFIIFLTILLIWAILQPSKPRFILQDATVYAFNVSGNPPNLLTSNFQITLSSRNPNNKIGIYYDRLDVYATYRSQQITFPTSIPPTYQGHKDVDIWSPFVYGTSVPIAPFNGVSLDTDKDNGVVLLIIRADGRVRWKVGTFITGKYHLHVKCPAYINFGNKANGVIVGDNAVKYTFTTSCSVSV

SEQ ID NO: 33055 - DNA, 1111 bp, Arabidopsis thaliana
  misc_feature (1)..(1111): Ceres Seq. ID no. 13601936
atcataaacccaccgagacgatgtctctcatcatcgtcttcttcttcttctcactcttgctcacatccaatggacagttcttcgacgagagcaagaactatgaaggctcctccgatctcgttgaccttcaataccacttgggtccggtcatatcctcgccggtgacgagtctctacatcatttggtacggccgatggaacccaactcaccaatctataatccgagactttctctactctgtctctgcaccggcaccggctcagtacccgtcagtatccaactggtggaagacagtgaggctatacagagaccagacaggttccaacatcaccgacactcttgtcttatccggagagttccacgactcaacgtactctcatggatctcatctcactcgcttctctgttcagtctgtgatcagaactgccttgacttccaagttaccactaaacgctgtaaacggcttgtacttagtcttgacctcggatgatgtagagatgcaagagttctgcagagcgatttgcgggtttcattacttcactttcccaagcgttgtgggtgcaaccgtaccgtatgcttgggtgggcaacagtgagagacagtgtccagaaatgtgtgcgtacccatttgcacagcctaagccatttccggggagcgggtttgtagccagagagaagatgaaaccgccaaatggagaggtaggaatcgatgggatgatcagtgtgatagctcatgagctggcagaagtgtcgagtaacccgatgttaaacggatggtatggaggagaggacgcgacagcaccgacagagatagcggatttatgtttgggagtgtatgggtcaggaggaggaggaggctatatgggaagtgtgtataaggataggtggaggaatgtgtataatgtgaagggcgttaaaggaagaaagtatctaattcaatgggtttgggatcttaataggaacagatgctttggaccaaacgctatgaattagagactatcatgtttgttacctcttttcaccaaagccttgagcttgaagcttggggaaacctgtatatggtttatcttttccttgcctagtcgattctatgcatttgattgtttaagact

SEQ ID NO: 33056 - protein, 329 aa, Arabidopsis thaliana
  misc_feature (1)..(329): Ceres Seq. ID no. 13601937
HKPTETMSLIIVFFFFSLLLTSNGQFFDESKNYEGSSDLVDLQYHLGPVISSPVTSLYIIWYGRWNPTHQSIIRDFLYSVSAPAPAQYPSVSNWWKTVRLYRDQTGSNITDTLVLSGEFHDSTYSHGSHLTRFSVQSVIRTALTSKLPLNAVNGLYLVLTSDDVEMQEFCRAICGFHYFTFPSVVGATVPYAWVGNSERQCPEMCAYPFAQPKPFPGSGFVAREKMKPPNGEVGIDGMISVIAHELAEVSSNPMLNGWYGGEDATAPTEIADLCLGVYGSGGGGGYMGSVYKDRWRNVYNVKGVKGRKYLIQWVWDLNRNRCFGPNAMN

SEQ ID NO: 33057 - protein, 323 aa, Arabidopsis thaliana
  misc_feature (1)..(323): Ceres Seq. ID no. 13601938
MSLIIVFFFFSLLLTSNGQFFDESKNYEGSSDLVDLQYHLGPVISSPVTSLYIIWYGRWNPTHQSIIRDFLYSVSAPAPAQYPSVSNWWKTVRLYRDQTGSNITDTLVLSGEFHDSTYSHGSHLTRFSVQSVIRTALTSKLPLNAVNGLYLVLTSDDVEMQEFCRAICGFHYFTFPSVVGATVPYAWVGNSERQCPEMCAYPFAQPKPFPGSGFVAREKMKPPNGEVGIDGMISVIAHELAEVSSNPMLNGWYGGEDATAPTEIADLCLGVYGSGGGGGYMGSVYKDRWRNVYNVKGVKGRKYLIQWVWDLNRNRCFGPNAMN

SEQ ID NO: 33058 - protein, 164 aa, Arabidopsis thaliana
  misc_feature (1)..(164): Ceres Seq. ID no. 13601939
MQEFCRAICGFHYFTFPSVVGATVPYAWVGNSERQCPEMCAYPFAQPKPFPGSGFVAREKMKPPNGEVGIDGMISVIAHELAEVSSNPMLNGWYGGEDATAPTEIADLCLGVYGSGGGGGYMGSVYKDRWRNVYNVKGVKGRKYLIQWVWDLNRNRCFGPNAMN

SEQ ID NO: 33059 - DNA, 875 bp, Arabidopsis thaliana
  misc_feature (1)..(875): Ceres Seq. ID no. 13601958
gggagtgagattgaaatttctggcggctctttcaaaggaaaattgtagattgtattcaaatacgttgaggaagaaagaaggtgacaaagaggaagacgaagaagaaagttgtagaaagtaatggtgttgtgggagttagctctaggaacagcttacttcttggggattaggcggacttaccggctcgcattgaagacccagcgtcggcttgttagccctaagcatccaaggattcgagattttatgcatcggaggacttatcaaatctttgatatggcacttagggtccacaagaacatacaacagagagacatggttattggtcggaatcttggaaactggattctccgggggcttgaccggatgaagccatcggctcaggttctactaccaaagaatacagagccaagcatagacaaggcgaaaagagtattacaatcaacccgtcttaaaccacatgttaacacgcagactcctcagaaccgtgaggttgataggaacttgttcatgtccttgaggaactttcggtccaaataccccattgcttcgatgatgatgatcaaacctccaagatccacgggaactactactcagtacaggccttacagtgttggtgaatccagtctgattaaaccaatttatgctagaggcgggttcaacagcgtcatcaggaaggacattttgcagtggatggtgcagaagagataaagccgccaaaattcatcaaaggcccttctgtttcttagattacaacatactcagaaggaaacacttgtctcaaccgtatcactttgtatgagtttttaataaccggtggattgataggaaaatctcctggacaactaaaaattgtgactagtattacttacttgact

SEQ ID NO: 33060 - protein, 195 aa, Arabidopsis thaliana
  misc_feature (1)..(195): Ceres Seq. ID no. 13601959
MVLWELALGTAYFLGIRRTYRLALKTQRRLVSPKHPRIRDFMHRRTYQIFDMALRVHKNIQQRDMVIGRNLGNWILRGLDRMKPSAQVLLPKNTEPSIDKAKRVLQSTRLKPHVNTQTPQNREVDRNLFMSLRNFRSKYPIASMMMIKPPRSTGTTTQYRPYSVGESSLIKPIYARGGFNSVIRKDILQWMVQKR

SEQ ID NO: 33061 - protein, 154 aa, Arabidopsis thaliana
  misc_feature (1)..(154): Ceres Seq. ID no. 13601960
MHRRTYQIFDMALRVHKNIQQRDMVIGRNLGNWILRGLDRMKPSAQVLLPKNTEPSIDKAKRVLQSTRLKPHVNTQTPQNREVDRNLFMSLRNFRSKYPIASMMMIKPPRSTGTTTQYRPYSVGESSLIKPIYARGGFNSVIRKDILQWMVQKR

SEQ ID NO: 33062 - protein, 144 aa, Arabidopsis thaliana
  misc_feature (1)..(144): Ceres Seq. ID no. 13601961
MALRVHKNIQQRDMVIGRNLGNWILRGLDRMKPSAQVLLPKNTEPSIDKAKRVLQSTRLKPHVNTQTPQNREVDRNLFMSLRNFRSKYPIASMMMIKPPRSTGTTTQYRPYSVGESSLIKPIYARGGFNSVIRKDILQWMVQKR

SEQ ID NO: 33063 - DNA, 1295 bp, Arabidopsis thaliana
  misc_feature (1)..(1295): Ceres Seq. ID no. 13601962
gagagaaagagtgctcagagtgagcgagagcatagcggtggagtgtcgccactggtaactccgacgatttttctcgtttgcgtaagccgaaagatcactctttttttggtgtcgactctgtttctgccgtatgattcttttggaaccctagtcacaggtttttgattttgcatggtttattgtagcgagttagttttttccgcatatgggtcttgattcttctttcgttaactcttctgggtttgccgattttcaatcaaacaatcttgaaagatcaaatcttttcctctacgagctgcaacgcgaaggtgtgatctttccactgaaactagctatcaagatgaattcatttcctgcacaaaaccttatgctatctgctacaaacgcaaacaaggactcaggcttgcgtacgtctaatgctcattggttacattcatgtatcgccgttccaaagaccacaggcattgatctttctcaggaacctcctgctgaaggtgtgatggtgcctcaatctcatttgtttcctcctcctattagagattccagaaacgatactgaaactgtgaaacagaagtccgtaaatcagtctccttcgaaagctttgaagccaaaaccgcaaaggaagaaacgctctgtatccaacaagtcaaagaaaacacctagcataccagaaacaaaacgtgagaaaaagaatctggacatcaacattgacatctcaagctttgatacttctggggttcctcctcctgtatgttcatgtacaggcgtttcaagggtttgctacaaatggggcatgggcggttggcaatcctcatgttgtaccatcagcatatcgacatacccactacccatgagcacaacaagacctggagctcgtcttgcaggaagaaaaatgagcaatggtgcttatgttaagctccttgcgaggcttgcggacgaaggctatgacctctctcaccctcttgatctcaagaaccattgggccagacacggtactaacaagtttgtgaccatcaagtagtcgtttcattagttgggtttgatttagatattagcttttgtggcttctttttaagtccttttcacagtcttagccttttggtatatatttgggagtactgtatttgctatagtagnggtatcctttacttgtttcccctgaagtagagtatatttcctgcaaaaatcccaacagtcgtggaaacacattatggcatgaacttgggtaacttcggtcatgcaacacattgctttggaattcacaaataaatttcaataagaaatgaatattagcg

SEQ ID NO: 33064 - protein, 271 aa, Arabidopsis thaliana
  misc_feature (1)..(271): Ceres Seq. ID no. 13601963
MGLDSSFVNSSGFADFQSNNLERSNLFLYELQREGVIFPLKLAIKMNSFPAQNLMLSATNANKDSGLRTSNAHWLHSCIAVPKTTGIDLSQEPPAEGVMVPQSHLFPPPIRDSRNDTETVKQKSVNQSPSKALKPKPQRKKRSVSNKSKKTPSIPETKREKKNLDINIDISSFDTSGVPPPVCSCTGVSRVCYKWGMGGWQSSCCTISISTYPLPMSTTRPGARLAGRKMSNGAYVKLLARLADEGYDLSHPLDLKNHWARHGTNKFVTIK

SEQ ID NO: 33065 - protein, 226 aa, Arabidopsis thaliana; identical to SEQ ID NO: 29583
  misc_feature (1)..(226): Ceres Seq. ID no. 13601964

SEQ ID NO: 33066 - protein, 217 aa, Arabidopsis thaliana; identical to SEQ ID NO: 29584
  misc_feature (1)..(217): Ceres Seq. ID no. 13601965

SEQ ID NO: 33067 - DNA, 1282 bp, Arabidopsis thaliana
  misc_feature (1)..(1282): Ceres Seq. ID no. 13601969
aaatctctgcagctttgttgggtctattataggaaacaaaaagcaatccttaagtttcagatatacacgcttgacgcttaaccttgcagacttttcgatacaagggtttaaaaggcagagaacataaaaaagagtgcaaagatgtttacttgcataaattgcactaaaatggcagacagaggtgaggaggatgaagaagatgaagcgcgtgggagcaccactcccaacactaaagaagccgttaaaagcctaactacacagatcaaagatatggcgtcgaaattctcaggttctcataaacaaagcaagccaactccgggctcttcgagcagcaacttgaggaagtttccggattttgacactgcatcagagagtgttccatacccttatcctggtggaagcacgagctccactcctgcttgggacttaccaagatcctcctaccatcaatctggacggccagactcaagattcacatcaatgtatggcggtgaacgtgaatccatctctgctcagtcgtgtgatgtggtactagaggatgacgagccaaaggagtggatggctcaagtagagcctggtgttcatatcacatttgtctcacttcccagtggaggaaatgatcttaaacggatacgtttcagccgggaggttttcgacaagtggcaggctcagaggtggtggggtgagaactatgacagaatagttgagctttacaatgttcaaagatttaaccgacaagctcttcaaactcctggtagatccgaggaccagtcgcagagagattcaacttacacaagaattgattcagcaagagaaagcagagactggacacaaagagacaacaacttcagaccaccaggaggcagtgtccctcatcatttttatggacctccaatggacgcagcaagaatcaccacctcatcgagggacgaaccgccttcaatgagtaatgctagtgaaatgcaaggtgagtgggttgaagaggacgagcctggtgtctacattaccatcagacagttaccagatggaactagagaactacgccgcgtcaggttcagtcgggaacggtttggggaagtgcatgccaagacatggtgggagcagaacagggacagaatacaaacccaatacctctaagaggacaaaaaacgagatcaatattgtagtcttctttaacacaacaaaggtatacacaaaaatcagaattttgttcatcttctaaaattttgaagaaaatcagaatgtgatatgaaaacaaaatgaaaatttgatttatgtttag

SEQ ID NO: 33068 - protein, 331 aa, Arabidopsis thaliana
  misc_feature (1)..(331): Ceres Seq. ID no. 13601970
MFTCINCTKMADRGEEDEEDEARGSTTPNTKEAVKSLTTQIKDMASKFSGSHKQSKPTPGSSSSNLRKFPDFDTASESVPYPYPGGSTSSTPAWDLPRSSYHQSGRPDSRFTSMYGGERESISAQSCDVVLEDDEPKEWMAQVEPGVHITFVSLPSGGNDLKRIRFSREVFDKWQAQRWWGENYDRIVELYNVQRFNRQALQTPGRSEDQSQRDSTYTRIDSARESRDWTQRDNNFRPPGGSVPHHFYGPPMDAARITTSSRDEPPSMSNASEMQGEWVEEDEPGVYITIRQLPDGTRELRRVRFSRERFGEVHAKTWWEQNRDRIQTQYL

SEQ ID NO: 33069 - protein, 322 aa, Arabidopsis thaliana
  misc_feature (1)..(322): Ceres Seq. ID no. 13601971
MADRGEEDEEDEARGSTTPNTKEAVKSLTTQIKDMASKFSGSHKQSKPTPGSSSSNLRKFPDFDTASESVPYPYPGGSTSSTPAWDLPRSSYHQSGRPDSRFTSMYGGERESISAQSCDVVLEDDEPKEWMAQVEPGVHITFVSLPSGGNDLKRIRFSREVFDKWQAQRWWGENYDRIVELYNVQRFNRQALQTPGRSEDQSQRDSTYTRIDSARESRDWTQRDNNFRPPGGSVPHHFYGPPMDAARITTSSRDEPPSMSNASEMQGEWVEEDEPGVYITIRQLPDGTRELRRVRFSRERFGEVHAKTWWEQNRDRIQTQYL

SEQ ID NO: 33070 - protein, 288 aa, Arabidopsis thaliana
  misc_feature (1)..(288): Ceres Seq. ID no. 13601972
MASKFSGSHKQSKPTPGSSSSNLRKFPDFDTASESVPYPYPGGSTSSTPAWDLPRSSYHQSGRPDSRFTSMYGGERESISAQSCDVVLEDDEPKEWMAQVEPGVHITFVSLPSGGNDLKRIRFSREVFDKWQAQRWWGENYDRIVELYNVQRFNRQALQTPGRSEDQSQRDSTYTRIDSARESRDWTQRDNNFRPPGGSVPHHFYGPPMDAARITTSSRDEPPSMSNASEMQGEWVEEDEPGVYITIRQLPDGTRELRRVRFSRERFGEVHAKTWWEQNRDRIQTQYL

SEQ ID NO: 33071 - DNA, 1967 bp, Arabidopsis thaliana
  misc_feature (1)..(1967): Ceres Seq. ID no. 13601976
atccagttgactccaaatagactagaaagagaaagaaagagagagagagagagagagagaaccagagattatcgaacacgaagcagaagacgattcgtggaagagacttggagagaatatttctcaatgtctcctctcccaatcttccatcgtcttcctcacgccacgttctcttcctttctcctctcactgtctcaagctggaagttctaaaacatcagtggcattcctcaatgccttcaaatcagaagatatcattgctcgaattggactatggtggcagcttataagggctgttgtagttgtacctgtcttcaagttcctggtgcttctatgtttggtcatgtctgtcatgttcttcgttgaggttatgtacatgggaatcgttgttttgtatgtcaagctgttcaagagaaagccagagaaattttacaaatgggaagccatggaggatgatgttgagtgtggcagtgcaagctaccctatggttcttgtgcagatacctatgtacaatgaaaaagaggtttgtgagcaatctattgcagctgcttgcaaaatctcatggccatcgaatcgtataataattcaagtgcttgatgattccacggatccagccagtaaggagttggtgaaaaaggagtgtgacagatggtctaaagaaggtgtcaacataacgtttgagataagggacaacaggaacggatacaaagctggtgcgttgagagaaggaatgaggcatagctatgtgaagcagtgtgattatgttgctatctttgatgctgatttccagcctgatcctgacttcctccaccgcactgttccattcttaattcacaatcccaagttagcacttgtacaaggccggtgggagtttgtgaacgcgggtcaatgcatgatgacgagattacaggagatgtctctaagttaccactttacaatagagcagcaagttggatcttcaacatttgccttctttgggttcaacggaactgctggcgtctggagaatctcagcattgaatgagtccgggggatggaatgaccagacaacagtagaagacatggatttagctgtacgagctacactgagaggctggaagtttctatatatcgatgatctcaaggtaaaaagtgagttaccttgttccttcaaagctctgcgtagccagcagcatcgatggacttgcggccctgccaatcttttaaggaaaatggctggacaaataataagaagcgagaatgtatctctatggaagaagtggtatatgttgtacagcttcttcttcatgcgcaagatcgtggctcacatcctcacattctgcttctactgtgttatcttgccagcaactgtattgttcccagaagtcacagttccgaaatgggctgcattttatctcccttctttgatcactctcttaatcgcaattggtagactaagatcaatccaccttttggctttctgggttctatttgagaatgcaatgtccctgctaagagcaaaggctctggtcatgggcttgttcgaaacaggaagagtacaagaatgggttgtgacggagaagttaggtgatactctcaagacgaagctgattccacaagttcctaacgtcagattcagagagagggtgcatttgctggagctattggttggagcgtacctgttattctgcggaatctacgacatcgtctatgggaagaacacactctatgtgtaccttctgtttcagtcagtggccttcttcgttgttggttttggatttgtaggaaaatatgttcctgcttcctcttacttagcataggatagatcatagagtctcaatatgtttcagaaggttttttgtttgatgtcatattgagaacaatgcctatatactactctccatttgtattaacacttgagtatctgtaaccaacgaagctcagatgtgatcgatattatttttttaacagtataaaaccacttaacact

SEQ ID NO: 33072 - protein, 598 aa, Arabidopsis thaliana
  misc_feature (1)..(598): Ceres Seq. ID no. 13601977
IQLTPNRLERERKRERERERTRDYRTRSRRRFVEETWREYFSMSPLPIFHRLPHATFSSFLLSLSQAGSSKTSVAFLNAFKSEDIIARIGLWWQLIRAVVVVPVFKFLVLLCLVMSVMFFVEVMYMGIVVLYVKLFKRKPEKFYKWEAMEDDVECGSASYPMVLVQIPMYNEKEVCEQSIAAACKISWPSNRIIIQVLDDSTDPASKELVKKECDRWSKEGVNITFEIRDNRNGYKAGALREGMRHSYVKQCDYVAIFDADFQPDPDFLHRTVPFLIHNPKLALVQGRWEFVNAGQCMMTRLQEMSLSYHFTIEQQVGSSTFAFFGFNGTAGVWRISALNESGGWNDQTTVEDMDLAVRATLRGWKFLYIDDLKVKSELPCSFKALRSQQHRWTCGPANLLRKMAGQIIRSENVSLWKKWYMLYSFFFMRKIVAHILTFCFYCVILPATVLFPEVTVPKWAAFYLPSLITLLIAIGRLRSIHLLAFWVLFENAMSLLRAKALVMGLFETGRVQEWVVTEKLGDTLKTKLIPQVPNVRFRERVHLLELLVGAYLLFCGIYDIVYGKNTLYVYLLFQSVAFFVVGFGFVGKYVPASSYLA

SEQ ID NO: 33073 - protein, 556 aa, Arabidopsis thaliana
  misc_feature (1)..(556): Ceres Seq. ID no. 13601978
MSPLPIFHRLPHATFSSFLLSLSQAGSSKTSVAFLNAFKSEDIIARIGLWWQLIRAVVVVPVFKFLVLLCLVMSVMFFVEVMYMGIVVLYVKLFKRKPEKFYKWEAMEDDVECGSASYPMVLVQIPMYNEKEVCEQSIAAACKISWPSNRIIIQVLDDSTDPASKELVKKECDRWSKEGVNITFEIRDNRNGYKAGALREGMRHSYVKQCDYVAIFDADFQPDPDFLHRTVPFLIHNPKLALVQGRWEFVNAGQCMMTRLQEMSLSYHFTIEQQVGSSTFAFFGFNGTAGVWRISALNESGGWNDQTTVEDMDLAVRATLRGWKFLYIDDLKVKSELPCSFKALRSQQHRWTCGPANLLRKMAGQIIRSENVSLWKKWYMLYSFFFMRKIVAHILTFCFYCVILPATVLFPEVTVPKWAAFYLPSLITLLIAIGRLRSIHLLAFWVLFENAMSLLRAKALVMGLFETGRVQEWVVTEKLGDTLKTKLIPQVPNVRFRERVHLLELLVGAYLLFCGIYDIVYGKNTLYVYLLFQSVAFFVVGFGFVGKYVPASSYLA

SEQ ID NO: 33074 - protein, 484 aa, Arabidopsis thaliana
  misc_feature (1)..(484): Ceres Seq. ID no. 13601979
MSVMFFVEVMYMGIVVLYVKLFKRKPEKFYKWEAMEDDVECGSASYPMVLVQIPMYNEKEVCEQSIAAACKISWPSNRIIIQVLDDSTDPASKELVKKECDRWSKEGVNITFEIRDNRNGYKAGALREGMRHSYVKQCDYVAIFDADFQPDPDFLHRTVPFLIHNPKLALVQGRWEFVNAGQCMMTRLQEMSLSYHFTIEQQVGSSTFAFFGFNGTAGVWRISALNESGGWNDQTTVEDMDLAVRATLRGWKFLYIDDLKVKSELPCSFKALRSQQHRWTCGPANLLRKMAGQIIRSENVSLWKKWYMLYSFFFMRKIVAHILTFCFYCVILPATVLFPEVTVPKWAAFYLPSLITLLIAIGRLRSIHLLAFWVLFENAMSLLRAKALVMGLFETGRVQEWVVTEKLGDTLKTKLIPQVPNVRFRERVHLLELLVGAYLLFCGIYDIVYGKNTLYVYLLFQSVAFFVVGFGFVGKYVPASSYLA

SEQ ID NO: 33075 - DNA, 1515 bp, Arabidopsis thaliana
  misc_feature (1)..(1515): Ceres Seq. ID no. 13602011
acacactctgcaacacctctcactcaaatttcattcaccatgttctctctcaaatccttaatctcctcacctttcacacaatccaccactcatggattattcaccaacccgattacccgacccgttaatccattaccacgtaccgtttccttcaccgttaccgcttccatgatacccaaaagatcctcagctaacatgattcccaaaaaccctccggcgaggcaacagctctaccaaccgttccgaccaccgtcatctcccattccaacccaattccgttcactcgactccgccggtaaaatcgaaatcctcgccggtcgaatggctctctggttcgaatacgcacctcttatctcttctctttacaccgatggtttcactcctccaaccatcgaagaactcaccggaatctcaagcatcgaacagaaccgtttaatcgtcggtgcgcaagttcgtgactcaattcttcaatctatccatgaaccggagctcatttctgcgttcgacaccggtggtgcagagcttctatacgaaattcgtctccttagcaccacgcagcgtgttgcagccgccacattcatcattgatcgtaatattgattcgaaaggagcacaggatttggcacgagccatcaaggattatcctaaccgtcgtggagacgttggatggttggattttgattacaacttaccaggagattgtctttcattcttgtattacaggcagagcagagagaataagaatccatcggatcagagaacctcgatgcttctacaagcattgggggttgcagaatcagaaaaggctaagaacaggttgaacacagagctatacggggacaaggaagcagagaaggagaaggagaagaagaagaaggaagaggaagtcaaagctattcggattccagtggtgaggcttaagtttggagaagtagcagaagcgacctcggtggtagttttaccggtttgtaaagcagaggaaggggaaaagaagattcttgaagctccaatggagatcatagccggaggggattttaaggtggttgaggcggagaaaggatggaagagatgggtagtgcttccgtcgtggaacccagtggcagccattgggaaaggcggtgtggcggtttctttcagggatgatagaaaagtgctgccttgggatggaaaggaggagcctttactggtagtggccgatagggtgaggaatgttgtggaggctgatgacgggtattatctcgtggtggctgagaacggacttaagctagagaaaggatcagatttgaaggcgagagaggtgaaggagagtttagggatggttgttttggtggtgaggccgccaagagaagatgatgatgattggcagacaagtcatcagaactgggactgaattaatagaatcaatactcatatgctgtaactgattacggagtcatcatggtcatgtaaaaattttggataaaggtggtaactttttgttctaagatacaatcagaaacagagcaatatttttctc

SEQ ID NO: 33076 - protein, 462 aa, Arabidopsis thaliana
  misc_feature (1)..(462): Ceres Seq. ID no. 13602012
THSATPLTQISFTMFSLKSLISSPFTQSTTHGLFTNPITRPVNPLPRTVSFTVTASMIPKRSSANMIPKNPPARQQLYQPFRPPSSPIPTQFRSLDSAGKIEILAGRMALWFEYAPLISSLYTDGFTPPTIEELTGISSIEQNRLIVGAQVRDSILQSIHEPELISAFDTGGAELLYEIRLLSTTQRVAAATFIIDRNIDSKGAQDLARAIKDYPNRRGDVGWLDFDYNLPGDCLSFLYYRQSRENKNPSDQRTSMLLQALGVAESEKAKNRLNTELYGDKEAEKEKEKKKKEEEVKAIRIPVVRLKFGEVAEATSVVVLPVCKAEEGEKKILEAPMEIIAGGDFKVVEAEKGWKRWVVLPSWNPVAAIGKGGVAVSFRDDRKVLPWDGKEEPLLVVADRVRNVVEADDGYYLVVAENGLKLEKGSDLKAREVKESLGMVVLVVRPPREDDDDWQTSHQNWD

SEQ ID NO: 33077 - protein, 449 aa, Arabidopsis thaliana
  misc_feature (1)..(449): Ceres Seq. ID no. 13602013
MFSLKSLISSPFTQSTTHGLFTNPITRPVNPLPRTVSFTVTASMIPKRSSANMIPKNPPARQQLYQPFRPPSSPIPTQFRSLDSAGKIEILAGRMALWFEYAPLISSLYTDGFTPPTIEELTGISSIEQNRLIVGAQVRDSILQSIHEPELISAFDTGGAELLYEIRLLSTTQRVAAATFIIDRNIDSKGAQDLARAIKDYPNRRGDVGWLDFDYNLPGDCLSFLYYRQSRENKNPSDQRTSMLLQALGVAESEKAKNRLNTELYGDKEAEKEKEKKKKEEEVKAIRIPVVRLKFGEVAEATSVVVLPVCKAEEGEKKILEAPMEIIAGGDFKVVEAEKGWKRWVVLPSWNPVAAIGKGGVAVSFRDDRKVLPWDGKEEPLLVVADRVRNVVEADDGYYLVVAENGLKLEKGSDLKAREVKESLGMVVLVVRPPREDDDDWQTSHQNWD

SEQ ID NO: 33078 - protein, 406 aa, Arabidopsis thaliana
  misc_feature (1)..(406): Ceres Seq. ID no. 13602014
MIPKRSSANMIPKNPPARQQLYQPFRPPSSPIPTQFRSLDSAGKIEILAGRMALWFEYAPLISSLYTDGFTPPTIEELTGISSIEQNRLIVGAQVRDSILQSIHEPELISAFDTGGAELLYEIRLLSTTQRVAAATFIIDRNIDSKGAQDLARAIKDYPNRRGDVGWLDFDYNLPGDCLSFLYYRQSRENKNPSDQRTSMLLQALGVAESEKAKNRLNTELYGDKEAEKEKEKKKKEEEVKAIRIPVVRLKFGEVAEATSVVVLPVCKAEEGEKKILEAPMEIIAGGDFKVVEAEKGWKRWVVLPSWNPVAAIGKGGVAVSFRDDRKVLPWDGKEEPLLVVADRVRNVVEADDGYYLVVAENGLKLEKGSDLKAREVKESLGMVVLVVRPPREDDDDWQTSHQNWD

SEQ ID NO: 33079 - DNA, 1486 bp, Arabidopsis thaliana
  misc_feature (1)..(1486): Ceres Seq. ID no. 13602015
atgacgataattgttttaattttgggccagagagaaagggtcgcaaaaccaccgccgtatatccacggccgtcttatcaccggcaacaaccgtaggtttttgttttccgtcgcgatggaggtggataagaaggacgagagagaggctgaatcttcggagcaagtggtgaatccatgggaagtgtccgccaaagacggcgggaagatcgattacgacaagcttattgacaaatttggatgtcaaaggcttgacgagtcactgattgatcgtgttcagagactgacttctcgtcaaccacacgtgttcctccgccgtagtgtcttcttcgcccaccgggatttcaatgagattttggacgcttatgagagaggagacaagttctatctctacactggaagaggaccttcatcagaagcattgcatttggggcatttgattcctttcatgtttaccaaatacttgcaagaagctttcaaggttccccttgttatacagctcacggatgatgaaaaaagtatatggaagaacttatcggtggaggaaagtcaaagacttgccagagaaaatgcgaaagatattattgcttgtggattcgatgtaacaaagaccttcattttctcggacttcgactatgttggcggtgctttctataaaaatatggtgaaggttggcaagtgcgttacacttaataaggctatgggaatctttggcttttccggtgaagatcctatcgcgaaactcagtttccctcctgtgcaggcagttccatcttttcctagctcattcccacatttgttccctggcaaggacaatctccgctgcttgattccttgtgctattgaccaggatccttattttagaatgactcgtgatgtcgcaccccggttaggctatagcaagcccgccctgattgagtcaacattttttcctgcgttgcagggagagaatggaaaaatgtctgctagtgatccaaattctgctatctatgtgactgattccgcaaaggacattaaaaacaagataaacagatatgcgtttagtggtgggcaagactccattgagaagcaccgagaacttggagcaaatctcgaggttgacatacccgtcaagtatctgagtttcttcctcgaagacgattctgaactagaacacattaaaaaggaatatggagaaggaagaatgctaacaggagaagtaaagaagagacttacggaagtgttgacagaaattgtggagagacaccgcagggctcgagctgctgttactgatgagatggttgatgcgttcatggcggtgagacctctcccaagcatgttcgaatagaaaaagtcagaaaccctttttggctcctcagcaacttcacatcactccgtttgatttggattcagacatctttgggtgtctattgatagatttgatccttgaaattgaaccatacttgttagttacaattttcatatttacatttatttatgaatcacattct

SEQ ID NO: 33080 - protein, 440 aa, Arabidopsis thaliana
  misc_feature (1)..(440): Ceres Seq. ID no. 13602016
MTIIVLILGQRERVAKPPPYIHGRLITGNNRRFLFSVAMEVDKKDEREAESSEQVVNPWEVSAKDGGKIDYDKLIDKFGCQRLDESLIDRVQRLTSRQPHVFLRRSVFFAHRDFNEILDAYERGDKFYLYTGRGPSSEALHLGHLIPFMFTKYLQEAFKVPLVIQLTDDEKSIWKNLSVEESQRLARENAKDIIACGFDVTKTFIFSDFDYVGGAFYKNMVKVGKCVTLNKAMGIFGFSGEDPIAKLSFPPVQAVPSFPSSFPHLFPGKDNLRCLIPCAIDQDPYFRMTRDVAPRLGYSKPALIESTFFPALQGENGKMSASDPNSAIYVTDSAKDIKNKINRYAFSGGQDSIEKHRELGANLEVDIPVKYLSFFLEDDSELEHIKKEYGEGRMLTGEVKKRLTEVLTEIVERHRRARAAVTDEMVDAFMAVRPLPSMFE

SEQ ID NO: 33081 - protein, 402 aa, Arabidopsis thaliana; identical to SEQ ID NO: 29656
  misc_feature (1)..(402): Ceres Seq. ID no. 13602017

SEQ ID NO: 33082 - protein, 292 aa, Arabidopsis thaliana; identical to SEQ ID NO: 29657
  misc_feature (1)..(292): Ceres Seq. ID no. 13602018

SEQ ID NO: 33083 - DNA, 885 bp, Arabidopsis thaliana
  misc_feature (1)..(885): Ceres Seq. ID no. 13602023
atgactttgaccagtgaccttccgttcaaagaatatcgacggttcttagacacatttttcaccggagtctcaccctcacagatagatgcattagaccaccaagaaaacaaagacttatcgatcatgaagatcagacttagcataaccatcatacttttatcatacacagtggctacggtggccggacaacaatgcggtcgtcaaggcggtggtcgaacttgtcccggtaacatctgctgcagtcagtacggttactgtggtaccaccgcggactactgttctccgaccaacaactgtcagagcaattgttggggaagtgggcctagcggaccaggggagagcgcgtcgaacgtacgcgccacctaccatttctataatccggcgcagaataattgggatttgagagccgtgagtgcttattgctccacgtgggatgctgataagccgtacgcatggcggagcaagtatggctggaccgccttctgcgggccggcaggacctcgtggtcaagcttcttgcggcaagtgtttaagggtgaagaacacaagaacaaatgctgcagtaactgtgagaatagtggaccaatgcagcaacggaggcttggatttggatgtagcaatgttcaatcaaatagacaccgatggttttggctatcaacaaggccatctcattgttgactaccaatttgtcgactgtggcaatgagctcattgggcagcctgattccagaaacatgcttgtttcggccattgatcgcgtttgatattatgtaatgattttgaggtcaatatcgatcggtctacataaaaataataaagaccgctatatatgtattgtcgagggatatatgtttcgtatcaataaggaaattttaaatattattatc

SEQ ID NO: 33084 - protein, 253 aa, Arabidopsis thaliana
  misc_feature (1)..(253): Ceres Seq. ID no. 13602024
MTLTSDLPFKEYRRFLDTFFTGVSPSQIDALDHQENKDLSIMKIRLSITIILLSYTVATVAGQQCGRQGGGRTCPGNICCSQYGYCGTTADYCSPTNNCQSNCWGSGPSGPGESASNVRATYHFYNPAQNNWDLRAVSAYCSTWDADKPYAWRSKYGWTAFCGPAGPRGQASCGKCLRVKNTRTNAAVTVRIVDQCSNGGLDLDVAMFNQIDTDGFGYQQGHLIVDYQFVDCGNELIGQPDSRNMLVSAIDRV

SEQ ID NO: 33085 - protein, 212 aa, Arabidopsis thaliana
  misc_feature (1)..(212): Ceres Seq. ID no. 13602025
MKIRLSITIILLSYTVATVAGQQCGRQGGGRTCPGNICCSQYGYCGTTADYCSPTNNCQSNCWGSGPSGPGESASNVRATYHFYNPAQNNWDLRAVSAYCSTWDADKPYAWRSKYGWTAFCGPAGPRGQASCGKCLRVKNTRTNAAVTVRIVDQCSNGGLDLDVAMFNQIDTDGFGYQQGHLIVDYQFVDCGNELIGQPDSRNMLVSAIDRV

SEQ ID NO: 33086 - DNA, 1105 bp, Arabidopsis thaliana
  misc_feature (1)..(1105): Ceres Seq. ID no. 13602030
aaagctctgaaaagatggccggagctgtttctgccgtcgatcaaccgttgaaaatcatcaccggagctgatgactttggagcgagcctcaaggacgcgatggtaacacacctccgctctctcggcatagacgtggaggataccggagtgtcctcttactactctgctggatctgaagtcggtcgccgcgtctccgcttcatcgtcttccgaagttcgcggcttagtctgctgcggcaccggcgtcggagttgcgatgttcgccaacaagttcccgggcgtctacgcagccacttgtctctccgtcgaagacgccgtcaacgctcgatcaataagcaattgcaatgtcctcgcattctccggcatcaaaacatccccggaaaccgccttggaaatcttcgacgcttggatcaaaactcctttcaaatctccttgtcctgcgtccggatccgaaccatggagctcagttatctcttccttcctcgacaattctctctccgagatgtctcagattggaaagtcaaccgccggcgattcaacaaccaagaagatcgatgaaacaaccgcgtcttgcgtaatttgctgcttggcgaagaacagagagttcactccagtggacatcatgccgggaggctcgatgaagatcgttagagagacgccgacgtcggcgattgtaagattcaaagcgggaagtgtggaaccggcgcatcaccacacattcggccatgaccttgtagtcataaagggaaagaaaagtgtgtggaatctgagcaagaaggagagagctgatctcgttgacggcgattacctattcactcccgccggtgatgttcaccgagtcaaatatcacgaagacactgagttcttcatcacttgggatggccattgggacatattccttgacgaagacctcgaaactgcaaagaaagccatcgaagaagaagcttgaaggtgtaaactttgtgtagtactctcttcttttgaatgttgtaagttctgagagtaaactttcttaaattgatgtactttgtaagaatctttgatttcaaaagatggtgtaatattacaaatactttctcttatgaacactatataaagggtttctac

SEQ ID NO: 33087 - protein, 314 aa, Arabidopsis thaliana
  misc_feature (1)..(314): Ceres Seq. ID no. 13602031
SSEKMAGAVSAVDQPLKIITGADDFGASLKDAMVTHLRSLGIDVEDTGVSSYYSAGSEVGRRVSASSSSEVRGLVCCGTGVGVAMFANKFPGVYAATCLSVEDAVNARSISNCNVLAFSGIKTSPETALEIFDAWIKTPFKSPCPASGSEPWSSVISSFLDNSLSEMSQIGKSTAGDSTTKKIDETTASCVICCLAKNREFTPVDIMPGGSMKIVRETPTSAIVRFKAGSVEPAHHHTFGHDLVVIKGKKSVWNLSKKERADLVDGDYLFTPAGDVHRVKYHEDTEFFITWDGHWDIFLDEDLETAKKAIEEEA

SEQ ID NO: 33088 - protein, 310 aa, Arabidopsis thaliana
  misc_feature (1)..(310): Ceres Seq. ID no. 13602032
MAGAVSAVDQPLKIITGADDFGASLKDAMVTHLRSLGIDVEDTGVSSYYSAGSEVGRRVSASSSSEVRGLVCCGTGVGVAMFANKFPGVYAATCLSVEDAVNARSISNCNVLAFSGIKTSPETALEIFDAWIKTPFKSPCPASGSEPWSSVISSFLDNSLSEMSQIGKSTAGDSTTKKIDETTASCVICCLAKNREFTPVDIMPGGSMKIVRETPTSAIVRFKAGSVEPAHHHTFGHDLVVIKGKKSVWNLSKKERADLVDGDYLFTPAGDVHRVKYHEDTEFFITWDGHWDIFLDEDLETAKKAIEEEA

SEQ ID NO: 33089 - protein, 282 aa, Arabidopsis thaliana
  misc_feature (1)..(282): Ceres Seq. ID no. 13602033
MVTHLRSLGIDVEDTGVSSYYSAGSEVGRRVSASSSSEVRGLVCCGTGVGVAMFANKFPGVYAATCLSVEDAVNARSISNCNVLAFSGIKTSPETALEIFDAWIKTPFKSPCPASGSEPWSSVISSFLDNSLSEMSQIGKSTAGDSTTKKIDETTASCVICCLAKNREFTPVDIMPGGSMKIVRETPTSAIVRFKAGSVEPAHHHTFGHDLVVIKGKKSVWNLSKKERADLVDGDYLFTPAGDVHRVKYHEDTEFFITWDGHWDIFLDEDLETAKKAIEEEA

SEQ ID NO: 33090 - DNA, 1220 bp, Arabidopsis thaliana
  misc_feature (1)..(1220): Ceres Seq. ID no. 13602061
aacgactcataactcatagctatatcttgtcttaaaaagaagaagcaaagagaattagtggagtacgataagcagagaagtatgttaaaggtggtgttgttgatgatgataatgatgttggcgtcacagtccgaggctcagctgaaccgtgacttttacaaggaaagctgtccatcattgttccttgtcgtgagacgagtcgtgaaacgggccgtggccagagagcctcgcatgggtgcttctctccttcgtttgttcttccatgattgttttgtcaatgggtgtgacggatccttactgttggatgacacaccgtcttttttgggagagaaaacctcaggacccagcaataactctgtgagggggttcgaagtgatcgacaaaatcaagtttaaggttgagaaaatgtgcccgggcatcgtctcatgcgcagacattctagccatcactgctcgggactccgttctcctcctaggtggaccggggtggagcgtgaaacttggaagaagagactctacgacggcgaacttcgcggccgcgaactccggagtcatccctcctccgatcactacccttagcaacctcataaaccgtttcaaagcacaaggtttgtccacacgtgacatggtcgccctctctggtgctcacaccattggacgagcccaatgtgttacattcagaaaccgaatctacaacgcaagcaatatcgacacctctttcgccatctctaaacggaggaactgtcctgccaccagtggctccggagacaacaagaaagccaatcttgacgtccgctctcccgataggttcgaccacggcttctacaagcaacttctgagcaaaaaaggtttgcttacgtcagaccaagtcctctttaataatggtcctaccgactcgctcgtcatagcttacagccacaatctcaatgccttctaccgcgactttgcaagggcaatgattaagatgggagacatcagccccctcaccggatccaatggtcagatccgccaaaactgtcggaggcccaactgaatgattctcttttatattatcccaagcccattgagctcaataatcacctcttcgtcaactgttttttcatgtgcattccccttcttcgtcaactgttaaaatacatcttcattatataaaaaacaataaacacgtaaaagtttgtgactatgcagttttccattataaattactgtctatattctctt

SEQ ID NO: 33091 - protein, 316 aa, Arabidopsis thaliana
  misc_feature (1)..(316): Ceres Seq. ID no. 13602062
MLKVVLLMMIMMLASQSEAQLNRDFYKESCPSLFLVVRRVVKRAVAREPRMGASLLRLFFHDCFVNGCDGSLLLDDTPSFLGEKTSGPSNNSVRGFEVIDKIKFKVEKMCPGIVSCADILAITARDSVLLLGGPGWSVKLGRRDSTTANFAAANSGVIPPPITTLSNLINRFKAQGLSTRDMVALSGAHTIGRAQCVTFRNRIYNASNIDTSFAISKRRNCPATSGSGDNKKANLDVRSPDRFDHGFYKQLLSKKGLLTSDQVLFNNGPTDSLVIAYSHNLNAFYRDFARAMIKMGDISPLTGSNGQIRQNCRRPN

SEQ ID NO: 33092 - protein, 309 aa, Arabidopsis thaliana
  misc_feature (1)..(309): Ceres Seq. ID no. 13602063
MMIMMLASQSEAQLNRDFYKESCPSLFLVVRRVVKRAVAREPRMGASLLRLFFHDCFVNGCDGSLLLDDTPSFLGEKTSGPSNNSVRGFEVIDKIKFKVEKMCPGIVSCADILAITARDSVLLLGGPGWSVKLGRRDSTTANFAAANSGVIPPPITTLSNLINRFKAQGLSTRDMVALSGAHTIGRAQCVTFRNRIYNASNIDTSFAISKRRNCPATSGSGDNKKANLDVRSPDRFDHGFYKQLLSKKGLLTSDQVLFNNGPTDSLVIAYSHNLNAFYRDFARAMIKMGDISPLTGSNGQIRQNCRRPN

SEQ ID NO: 33093 - protein, 308 aa, Arabidopsis thaliana
  misc_feature (1)..(308): Ceres Seq. ID no. 13602064
MIMMLASQSEAQLNRDFYKESCPSLFLVVRRVVKRAVAREPRMGASLLRLFFHDCFVNGCDGSLLLDDTPSFLGEKTSGPSNNSVRGFEVIDKIKFKVEKMCPGIVSCADILAITARDSVLLLGGPGWSVKLGRRDSTTANFAAANSGVIPPPITTLSNLINRFKAQGLSTRDMVALSGAHTIGRAQCVTFRNRIYNASNIDTSFAISKRRNCPATSGSGDNKKANLDVRSPDRFDHGFYKQLLSKKGLLTSDQVLFNNGPTDSLVIAYSHNLNAFYRDFARAMIKMGDISPLTGSNGQIRQNCRRPN

SEQ ID NO: 33094 - DNA, 956 bp, Arabidopsis thaliana
  misc_feature (1)..(956): Ceres Seq. ID no. 13602069
atgattggtggtttcttcgccgatgtaaaattcaacagatcgagagagaaaaaactctctctccctcctccgttcaccgtcgcgactcggctctacagtacattttgttgagcaatctcgtatttagaggattccaatgtctggcgcagaggataataaatcttcccatgctcagctttcgtcccaaatttttcttgatcttgtggattcggtgatagctgatgtagcatctgagtgtcatcgggtagcacgactaggacttgatcgtgatttggatatagtagaagaagagttgagattgtcagtggaagcgcgtgcgaagatcgctgatcctagcaacaacctcgaaaccaacaccaaatatgttgttgatatatttgggcagactcaccctcctgtagctagtgaagtgttcaattgcatgaactgtgggcgacaaattgttgcaggaaggtttgctcctcatctcgaaaaatgcatgggaaagggaagaaaggctcgtgccaagacaaccagaagcacaacggctgcacagaaccggaatgcacgacgcagccccaatccacgatattctccttatccaaattctgctagtgagaaccagttagcaagtggatcacctggtgttgcaggtgaagactgctcaaatttcacagttcgagagaacgtgaaaggagactgaagtacaactgatgagaggcttatactgattactgaacgacaatgtggctagtaactgactcgaccagactggtataaatcgaattgctaggtttatattcagttcacaaaaaaagagagaaaagcggcgcaaaaggaaaagtagcggaggttcataatgtagctatttctacagcttactaatggggtatcaatatattagtacatgcaccatcatgttataattacaaaaaactctgtagagtcctcaatcaaacagttcccactgttgtgtt

SEQ ID NO: 33095 - protein, 181 aa, Arabidopsis thaliana
  misc_feature (1)..(181): Ceres Seq. ID no. 13602070
MSGAEDNKSSHAQLSSQIFLDLVDSVIADVASECHRVARLGLDRDLDIVEEELRLSVEARAKIADPSNNLETNTKYVVDIFGQTHPPVASEVFNCMNCGRQIVAGRFAPHLEKCMGKGRKARAKTTRSTTAAQNRNARRSPNPRYSPYPNSASENQLASGSPGVAGEDCSNFTVRENVKGD

SEQ ID NO: 33096 - DNA, 1019 bp, Arabidopsis thaliana
  misc_feature (1)..(1019): Ceres Seq. ID no. 13602082
aaatcacttgctagtactcttcacactctctacaatgttgtctatgctctggttccttctatctcttctctctcttcttctacttccttgtctccgaccttgctttcctgctaaaggatctctgaaaaacaaaaagaagattgacaagggaacttatgtggtcggagaggaggagacacctaaagagcttcagagagagctgatgccgagacacgtggcagtgataatggacggaaaccggagatgggctaaacagaccggattgttgacgtcacaaggctacgaggctggagctaaacggcttctcgagttcgctgacctctgcttcaaactagggataaatactgtctcagcttttgctttctccactgagaattggggaagacacaagattgaagtcaaatgcttgatgtatttgttccaacgttacctcaagtcaaagatccaatttttccagagcaaggaaatccgagtttctgttatcgggaatcttgcgaagatccctgagtctctcctccgaacagttcacgagttagaggaagctacaaagagttacaagaagaagcatctcatcttggccatagattacagcgggagattcgacatcttgggtgcttgcaagaacattgtgaagaaatcagaacaaggtttgatccgagaggaagacgtggacgagacgttgttcgagagagagcttcagactcggtgtaccgagttcccaagtcctgatctcttgattaggactagtggggaacagaggattagtaacttcttcttgtggcagctcgcttataccgagtttttcttttcgcctgtactttggcctgatttcgataagcagaagtttatagaggccctggtttcgtatcagcgcagggatagacgatttggctcccggctttgatccacatttgatcctatggtctgtcatgtttcctctgttttgttctgtttctctctgtgtctttatgttcatctgacttttgcagaaataattatactgtctagtctctcgtaga

SEQ ID NO: 33097 - protein, 300 aa, Arabidopsis thaliana
  misc_feature (1)..(300): Ceres Seq. ID no. 13602083
NHLLVLFTLSTMLSMLWFLLSLLSLLLLPCLRPCFPAKGSLKNKKKIDKGTYVVGEEETPKELQRELMPRHVAVIMDGNRRWAKQTGLLTSQGYEAGAKRLLEFADLCFKLGINTVSAFAFSTENWGRHKIEVKCLMYLFQRYLKSKIQFFQSKEIRVSVIGNLAKIPESLLRTVHELEEATKSYKKKHLILAIDYSGRFDILGACKNIVKKSEQGLIREEDVDETLFERELQTRCTEFPSPDLLIRTSGEQRISNFFLWQLAYTEFFFSPVLWPDFDKQKFIEALVSYQRRDRRFGSRL

SEQ ID NO: 33098 - protein, 289 aa, Arabidopsis thaliana
  misc_feature (1)..(289): Ceres Seq. ID no. 13602084
MLSMLWFLLSLLSLLLLPCLRPCFPAKGSLKNKKKIDKGTYVVGEEETPKELQRELMPRHVAVIMDGNRRWAKQTGLLTSQGYEAGAKRLLEFADLCFKLGINTVSAFAFSTENWGRHKIEVKCLMYLFQRYLKSKIQFFQSKEIRVSVIGNLAKIPESLLRTVHELEEATKSYKKKHLILAIDYSGRFDILGACKNIVKKSEQGLIREEDVDETLFERELQTRCTEFPSPDLLIRTSGEQRISNFFLWQLAYTEFFFSPVLWPDFDKQKFIEALVSYQRRDRRFGSRL

SEQ ID NO: 33099 - protein, 286 aa, Arabidopsis thaliana
  misc_feature (1)..(286): Ceres Seq. ID no. 13602085
MLWFLLSLLSLLLLPCLRPCFPAKGSLKNKKKIDKGTYVVGEEETPKELQRELMPRHVAVIMDGNRRWAKQTGLLTSQGYEAGAKRLLEFADLCFKLGINTVSAFAFSTENWGRHKIEVKCLMYLFQRYLKSKIQFFQSKEIRVSVIGNLAKIPESLLRTVHELEEATKSYKKKHLILAIDYSGRFDILGACKNIVKKSEQGLIREEDVDETLFERELQTRCTEFPSPDLLIRTSGEQRISNFFLWQLAYTEFFFSPVLWPDFDKQKFIEALVSYQRRDRRFGSRL

SEQ ID NO: 33100 - DNA, 1243 bp, Arabidopsis thaliana
  misc_feature (1)..(1243): Ceres Seq. ID no. 13602090
actcctaaaaactataatcattgagaaacccattttaagattacatcaatcatcatcgctgttagagagaaactggagcaacttctcaaattttagcctttttttgtttttgcattttgcctaatcggtgcttctccagatttcgcttatcttgttcctatagcataacaatggcggatttcaaaccaaggatcgagatttcgttccttgaaaccttcatttgcagcgctttcgctgcttgttttgctgagttatgtactataccgttggacacagccaaagttagacttcagcttcaaagaaagattcccactggagatggtgagaatttgcccaagtatagaggatcaattggtactctagctaccatagctagagaagaaggtatttcaggtctttggaaaggtgttattgcaggacttcatcgccaatgtatctatggtggcttaaggattgggttatatgagcctgtgaagacacttttggttggaagtgactttattggcgatattcctttatatcaaaagattcttgcagctttgttaactggagctatagctattattgtagctaatccaactgatcttgttaaagttcggcttcaatcagaaggaaagttaccggctggggttcctaggcgttatgcaggagctgtagacgcttatttcaccattgtgaagctggaaggagttagtgcgctatggactggacttggtcccaatattgcccggaatgctattgtaaatgctgcagagttagctagttatgatcaaataaaggagacaattatgaaaattccgttcttcagagacagtgttttaactcatctactagctggtttagctgcaggcttcttcgctgtctgcatcggttctccaattgatgtggtgaaatctagaatgatgggagactctacttaccgaaacacagtcgattgcttcatcaaaacgatgaagaccgaggggattatggcattctacaaaggatttctcccgaattttacacggctaggaacctggaatgccattatgttcctcacattagaacaagtgaaaaaagtgtttctaagagaagtcttgtacgattgattctcagatccctagtcgaaaaccataccttattacataatcccttctataaaactttgaattgttagaattaaaacatatatactttctatgttatgtgagctttgttatttagattagtatagaaacattttatccaaaaaaaaattctttgc

SEQ ID NO: 33101 - protein, 305 aa, Arabidopsis thaliana
  misc_feature (1)..(305): Ceres Seq. ID no. 13602091
MADFKPRIEISFLETFICSAFAACFAELCTIPLDTAKVRLQLQRKIPTGDGENLPKYRGSIGTLATIAREEGISGLWKGVIAGLHRQCIYGGLRIGLYEPVKTLLVGSDFIGDIPLYQKILAALLTGAIAIIVANPTDLVKVRLQSEGKLPAGVPRRYAGAVDAYFTIVKLEGVSALWTGLGPNIARNAIVNAAELASYDQIKETIMKIPFFRDSVLTHLLAGLAAGFFAVCIGSPIDVVKSRMMGDSTYRNTVDCFIKTMKTEGIMAFYKGFLPNFTRLGTWNAIMFLTLEQVKKVFLREVLYD

SEQ ID NO: 33102 - DNA, 870 bp, Arabidopsis thaliana
  misc_feature (1)..(870): Ceres Seq. ID no. 13602092
aaataccaagcaaccaatttcttgcaattttcctctcctcccaaccaaaacacaagagccaagaacaaagaaaccatggatcatgatcacatgcatggaatgcctcgaccatcatcatcatcatcatcatcaccatcatccatgatgaacaatggatccatgaacgaaggaggaggacatcaccacatgaagatgatgatgcacatgaccttcttttggggcaagaacacggaggttctcttctccggttggcccggaacaagctccggcatgtatgctctttgtcttatctttgtcttctttctcgccgtcctcaccgaatggcttgctcattcctctctcctccgtggctccaccggagattcggctaatcgtgccgccgggttaatccaaaccgccgtgtataccctccgtatcggcctcgcctatctagtcatgctcgccgtcatgtcgtttaacgccggtgtgtttctcgtcgctctggccggtcatgccgttggtttcatgttgttcggaagccaaactttccggaatacctccgatgaccggaaaactaactatgttcctccctcaggttgtgcttgttgatgataatatcaatgctttatatatatgtatggattgatccatgcttgtgattcaaattaaagatctagggtttgtagttttcttggttattttatggattgttcttgaggttcatgtgtgtgtgaatgtgaggaggaggaatatttgatattttctatcgtttgcttaattttttttgcttttgttttattctgctggctaatggtgaaagctgagtatacaatttactacttttgggctccaatttgttttttttttctctcagaatttcatatataattt

SEQ ID NO: 33103 - protein, 195 aa, Arabidopsis thaliana
  misc_feature (1)..(195): Ceres Seq. ID no. 13602093
KYQATNFLQFSSPPNQNTRAKNKETMDHDHMHGMPRPSSSSSSSPSSMMNNGSMNEGGGHHHMKMMMHMTFFWGKNTEVLFSGWPGTSSGMYALCLIFVFFLAVLTEWLAHSSLLRGSTGDSANRAAGLIQTAVYTLRIGLAYLVMLAVMSFNAGVFLVALAGHAVGFMLFGSQTFRNTSDDRKTNYVPPSGCAC

SEQ ID NO: 33104 - protein, 170 aa, Arabidopsis thaliana
  misc_feature (1)..(170): Ceres Seq. ID no. 13602094
MDHDHMHGMPRPSSSSSSSPSSMMNNGSMNEGGGHHHMKMMMHMTFFWGKNTEVLFSGWPGTSSGMYALCLIFVFFLAVLTEWLAHSSLLRGSTGDSANRAAGLIQTAVYTLRIGLAYLVMLAVMSFNAGVFLVALAGHAVGFMLFGSQTFRNTSDDRKTNYVPPSGCAC

SEQ ID NO: 33105 - protein, 165 aa, Arabidopsis thaliana
  misc_feature (1)..(165): Ceres Seq. ID no. 13602095
MHGMPRPSSSSSSSPSSMMNNGSMNEGGGHHHMKMMMHMTFFWGKNTEVLFSGWPGTSSGMYALCLIFVFFLAVLTEWLAHSSLLRGSTGDSANRAAGLIQTAVYTLRIGLAYLVMLAVMSFNAGVFLVALAGHAVGFMLFGSQTFRNTSDDRKTNYVPPSGCAC

SEQ ID NO: 33106 - DNA, 574 bp, Arabidopsis thaliana
  misc_feature (1)..(574): Ceres Seq. ID no. 13602096
aaaatcttcacattgcacgtaaaaaatatctttatacaatgaacggcatgagtggatcttctccggcggctccggctccttcaccatcatcgttcttccaacatcgccaccgtcacggtggtatgatgcatatgactttcttttggggaaaaaccacggaggttctattcgacggatggccagggaccagtctgaaaatgtattgggtctgtctcgccgtcatttttgttatttccgctttctccgagtgtctatcgcggtgcggtttcatgaaatccggtccggctagcttgggaggcgggctattacagactgcggtttacaccgtgagggctgctttgtcttatttggtcatgctggctgtgatgtcgttcaatggaggagtcttcgtggctgcgatggctggttttggattagggtttatgatttttggaagtagggcttttagggccactagcagtaacagtcacaccgaggttcaatcacattgttgatttttgtcttagatcgtttttattttccttgtttcccgttgaaataatgattaggaaaataaaaaaattcacgtttttgg

SEQ ID NO: 33107 - protein, 163 aa, Arabidopsis thaliana
  misc_feature (1)..(163): Ceres Seq. ID no. 13602097
NLHIARKKYLYTMNGMSGSSPAAPAPSPSSFFQHRHRHGGMMHMTFFWGKTTEVLFDGWPGTSLKMYWVCLAVIFVISAFSECLSRCGFMKSGPASLGGGLLQTAVYTVRAALSYLVMLAVMSFNGGVFVAAMAGFGLGFMIFGSRAFRATSSNSHTEVQSHC

SEQ ID NO: 33108 - protein, 151 aa, Arabidopsis thaliana
  misc_feature (1)..(151): Ceres Seq. ID no. 13602098
MNGMSGSSPAAPAPSPSSFFQHRHRHGGMMHMTFFWGKTTEVLFDGWPGTSLKMYWVCLAVIFVISAFSECLSRCGFMKSGPASLGGGLLQTAVYTVRAALSYLVMLAVMSFNGGVFVAAMAGFGLGFMIFGSRAFRATSSNSHTEVQSHC

SEQ ID NO: 33109 - protein, 148 aa, Arabidopsis thaliana
  misc_feature (1)..(148): Ceres Seq. ID no. 13602099
MSGSSPAAPAPSPSSFFQHRHRHGGMMHMTFFWGKTTEVLFDGWPGTSLKMYWVCLAVIFVISAFSECLSRCGFMKSGPASLGGGLLQTAVYTVRAALSYLVMLAVMSFNGGVFVAAMAGFGLGFMIFGSRAFRATSSNSHTEVQSHC

SEQ ID NO: 33110 - DNA, 1432 bp, Arabidopsis thaliana
  misc_feature (1)..(1432): Ceres Seq. ID no. 13602108
tagggaaaaactttttagggaaaaactttttaggtccaaagatcgagagagaagagaagattttgaattttttttgttttataaagtttcgtcttaagcgatcgattttttgtgcgaaagattgaaactttttggtaagataattgtgttgtgtggttggatcgtggaggtgggtcttctttcgaatggcgcaacaagggcagggaagcatggaccctgccgctctcgatgatatcattcgtcgtttgttggattacagaaaccctaagcctggtaccaaacaggctatgctcaacgagtctgagatccgtcagctttgcatcgtctctagagagatttttcttcaacagcctaaccttcttgagctcgaagctcctatcaagatctgcggtgatattcatggacaatactcagatctattgaggctgtttgagtatggaggcttcccacctacagctaactatttattcttaggagattacgtagacaggggcaagcagagtttggagactatttgtcttctgcttgcttacaaaatcaaataccctgagaacttttttcttctaagaggaaaccacgaatgtgcttctattaacagaatctatggattctatgatgaatgtaaacgtcgattcagtgtgagactctggaaagtgtttacagattcttttaactgtctccctgttgctgctgttatagacgataagatattatgtatgcacggtggcctttctcccgatttgaccaacgtggaacagattaagaacattaagcgacctactgatgttcctgactctggtttgctctgtgatctgctttggtctgatccaagcaaagatgtcaaaggttgggggatgaatgaccgtggagtctcttacacgtttggccctgacaaagtcgcggagtttctaataaagaatgatatggatctcatctgccgtgcccaccaggttgtagaggatggatatgagtttttcgccgatagacagcttgttacgatattttctgctcccaactactgtggtgaatttgacaatgctggtgctatgatgagtgttgatgaaagtttaatgtgctctttccaaattcttaagcctgctgatcgaaagccccggttcttatgaagtaaagagttgaaacctcgcgggaaagaagaggaaaaaggcgatacgaaagcgggagagacatttgaagctccctgagactttgtccggaggccttgcaaaggcaaaaaaacataatttacatgttatattatcttatttgaactcttgccatttcttttctcaaaacactttatgttcttatgatcttctcctctgactctatatagacagtaaaaaaagtctgcaaattttcattctttttcaacaaccaatttcctcagtgtacatactaaattgttctgtatccatacacacatatacttggg

SEQ ID NO: 33111 - protein, 312 aa, Arabidopsis thaliana
  misc_feature (1)..(312): Ceres Seq. ID no. 13602109
MAQQGQGSMDPAALDDIIRRLLDYRNPKPGTKQAMLNESEIRQLCIVSREIFLQQPNLLELEAPIKICGDIHGQYSDLLRLFEYGGFPPTANYLFLGDYVDRGKQSLETICLLLAYKIKYPENFFLLRGNHECASINRIYGFYDECKRRFSVRLWKVFTDSFNCLPVAAVIDDKILCMHGGLSPDLTNVEQIKNIKRPTDVPDSGLLCDLLWSDPSKDVKGWGMNDRGVSYTFGPDKVAEFLIKNDMDLICRAHQVVEDGYEFFADRQLVTIFSAPNYCGEFDNAGAMMSVDESLMCSFQILKPADRKPRFL

SEQ ID NO: 33112 - protein, 304 aa, Arabidopsis thaliana
  misc_feature (1)..(304): Ceres Seq. ID no. 13602110
MDPAALDDIIRRLLDYRNPKPGTKQAMLNESEIRQLCIVSREIFLQQPNLLELEAPIKICGDIHGQYSDLLRLFEYGGFPPTANYLFLGDYVDRGKQSLETICLLLAYKIKYPENFFLLRGNHECASINRIYGFYDECKRRFSVRLWKVFTDSFNCLPVAAVIDDKILCMHGGLSPDLTNVEQIKNIKRPTDVPDSGLLCDLLWSDPSKDVKGWGMNDRGVSYTFGPDKVAEFLIKNDMDLICRAHQVVEDGYEFFADRQLVTIFSAPNYCGEFDNAGAMMSVDESLMCSFQILKPADRKPRFL

SEQ ID NO: 33113 - protein, 278 aa, Arabidopsis thaliana
  misc_feature (1)..(278): Ceres Seq. ID no. 13602111
MLNESEIRQLCIVSREIFLQQPNLLELEAPIKICGDIHGQYSDLLRLFEYGGFPPTANYLFLGDYVDRGKQSLETICLLLAYKIKYPENFFLLRGNHECASINRIYGFYDECKRRFSVRLWKVFTDSFNCLPVAAVIDDKILCMHGGLSPDLTNVEQIKNIKRPTDVPDSGLLCDLLWSDPSKDVKGWGMNDRGVSYTFGPDKVAEFLIKNDMDLICRAHQVVEDGYEFFADRQLVTIFSAPNYCGEFDNAGAMMSVDESLMCSFQILKPADRKPRFL

SEQ ID NO: 33114 - DNA, 1340 bp, Arabidopsis thaliana
  misc_feature (1)..(1340): Ceres Seq. ID no. 13602116
gctgtgaaagagatcgttcttctctctgtttcacataaaaggaaaacataagaaaagaaaaaaaaaaatctttctctttcacaatcttaatttctgctcaccatcaaggcaagtttccttcttttgatcctcaacaatttccattgctactaaaaatatcttctttccaaaacaattcacgcatttacgtttttctcaatctttacatatatggtaaccaactcttattccattcctctgtaactcacacaaattcctgtccaaaaattagttttttcttttcatgtgatgtgagaatttgggttacgagaaagatgaagactattagtggattaggtattgggttaagtttaatgtttgggtttcttctattagcacttgttggagaagtctactatcttctaagatgtaagaagcacaagaagagagtcataagccaagagagtgaagaagagaaagaagaagaacaacaacaaaacggatacgctaaagaactaatccagctcttctgcttcaaaaaacctcaatctctgcagcaaaacaatggaggaagagaaggtgaagtctcaatgaatgaagatgggaatccagatttagaacttgggttgatgaaacacttgaatggaggagatctagggtttgaagcagagcttatgaagcttcataaccagaggtttctattcacaatcatggaagagacaaaagcagatttggaatctgaagatgggggtaaatcaagattaggttcaagatcaagaagaagaagcttgagtgatgttcctaatgactgtaatacccctggattcactccattggcttctcctaaaaagtcatcatctcctctggagtcttatccacaccatggattcaatcctctgtttgagtcagacggtgagcttgagtttaacaagtttttcaggtcctcttcttcacctccaccgaagtttaagttcatgagagatgctgaagagaagctaaggaagagattgattgaagaagccaaaagaagagaactctcgattgtaacagaaggttcgtttctcaagtttatgaatcctgcgatgaacagagagaagaaacagagtattcaagaatgtgatgaaacggtgtcgttttctccttcttcttcctcatcaggtacaacaattacaaatcttagaacgttagtggttgtttagtattagcatctctgtggctttactcttttaatttttatttttggttgaatttttgtttccaaaaatttcaattatattgtgtgaaaattctatctttcctttctctcattcttgttatttaggaatgatttcttctgtacgtatcaatctgaaattttttgc

SEQ ID NO: 33115 - protein, 287 aa, Arabidopsis thaliana
  misc_feature (1)..(287): Ceres Seq. ID no. 13602117
MKTISGLGIGLSLMFGFLLLALVGEVYYLLRCKKHKKRVISQESEEEKEEEQQQNGYAKELIQLFCFKKPQSLQQNNGGREGEVSMNEDGNPDLELGLMKHLNGGDLGFEAELMKLHNQRFLFTIMEETKADLESEDGGKSRLGSRSRRRSLSDVPNDCNTPGFTPLASPKKSSSPLESYPHHGFNPLFESDGELEFNKFFRSSSSPPPKFKFMRDAEEKLRKRLIEEAKRRELSIVTEGSFLKFMNPAMNREKKQSIQECDETVSFSPSSSSSGTTITNLRTLVVV

SEQ ID NO: 33116 - protein, 274 aa, Arabidopsis thaliana
  misc_feature (1)..(274): Ceres Seq. ID no. 13602118
MFGFLLLALVGEVYYLLRCKKHKKRVISQESEEEKEEEQQQNGYAKELIQLFCFKKPQSLQQNNGGREGEVSMNEDGNPDLELGLMKHLNGGDLGFEAELMKLHNQRFLFTIMEETKADLESEDGGKSRLGSRSRRRSLSDVPNDCNTPGFTPLASPKKSSSPLESYPHHGFNPLFESDGELEFNKFFRSSSSPPPKFKFMRDAEEKLRKRLIEEAKRRELSIVTEGSFLKFMNPAMNREKKQSIQECDETVSFSPSSSSSGTTITNLRTLVVV

SEQ ID NO: 33117 - protein, 202 aa, Arabidopsis thaliana
  misc_feature (1)..(202): Ceres Seq. ID no. 13602119
MNEDGNPDLELGLMKHLNGGDLGFEAELMKLHNQRFLFTIMEETKADLESEDGGKSRLGSRSRRRSLSDVPNDCNTPGFTPLASPKKSSSPLESYPHHGFNPLFESDGELEFNKFFRSSSSPPPKFKFMRDAEEKLRKRLIEEAKRRELSIVTEGSFLKFMNPAMNREKKQSIQECDETVSFSPSSSSSGTTITNLRTLVVV

SEQ ID NO: 33118 - DNA, 1724 bp, Arabidopsis thaliana
  misc_feature (1)..(1724): Ceres Seq. ID no. 13602132
tttttagtctccctccgcgtagaagcttctccgagacttgtctctgctttgattgaagaagacgcttgatcgaaaattcccttagatttcgtaaatagggttttacagaaggtgagattacacagagatcggatttgcgaaaaaaaaaaatgggaagtccaaagaagaacgagaacaaaggcttcttcgccgccatgacttctggcttctccatgttcggtaccgccgtgtcgagatccgttaacggcgtgcaaggtaatgaaggagttgaggtcataaatccagaaggtggcaaggaagatgctgaagaggaagctcagaaaggaaggtggaaggacgaggaacgagatagttactggaagatgatgcagaaatatataggttcggatattacgtcaatggtgactcttcctgttgttatatttgagcctatgactatgctccagaagatggctgagataatggagtattctcatttgttggatcaagcagatgaatgcgaagatccatacttgcgtttagtatatgcttcatcatgggctatatctgtttactatgccttccaacgaacttggaagcctttcaatcctattcttggggagacatatgagatggtcaaccatggtgggatttcttttatttctgagcaggttagccatcatccaccaatgagtgctggtcatgccgagaacgagcacttcatttacgacatcacatcaaagttgaaaactaaacttttgggtaactctgttgatgtttaccctgtgggaagaacgcgtgtaaccctcaagaaagatggtgtggttctggatttggtgccgcctctcactaagattcacaatctaatatttggacgaacctgggttgactcacctggggaaatggtcatgacaaatttaaccactggagacaaagttgtgctttatttccagccatgtggctggttcggttctggccgctatgaagttgatggctacgtttacagcgcagctgaagaaccgaaaatcatgatgacaggaaaatggaatgagaaaatgagctaccaaccttgtgatgccgaaggggaaccccttccaggaacagagctgaaagaggtgtggcatttggctgatgtccccaaaaacgacaactttcagtacactcactttgctcacaagataaacagcttcgacacagcgcctgctaagctcttggcttcagactcacgtatccgtcctgatagatattcccttgagcagggtgacctttctaaagctggttccgagaaacacagccttgaggagagacaaagggccgaaaagaggaccagagagacaaagggacaaaagttcactccaagatggttcgatctaacggatgagatcacacctactccatggggagatattgaagtataccaatacaacgggaagtacaatgaacaccgagacacggcagagagctcaagtagtgcctccaacgaaacggacctcaaatcgatcgagtttaatccttggcaatatggtaatatctcaaccgaatgaagtaactcttatagtttaatttgttatctctatatacgaatgctgtgattcatgttcacttgaaagtgagtcccatgttgtttttaactttgtttcagactgaaaaatctgattatgtagtttgagtgataaaacataagttttgtgtttctgtctcattgtatctttgttccatttcgatcaatagtaattatgtttgtt

SEQ ID NO: 33119 - protein, 457 aa, Arabidopsis thaliana
  misc_feature (1)..(457): Ceres Seq. ID no. 13602133
MGSPKKNENKGFFAAMTSGFSMFGTAVSRSVNGVQGNEGVEVINPEGGKEDAEEEAQKGRWKDEERDSYWKMMQKYIGSDITSMVTLPVVIFEPMTMLQKMAEIMEYSHLLDQADECEDPYLRLVYASSWAISVYYAFQRTWKPFNPILGETYEMVNHGGISFISEQVSHHPPMSAGHAENEHFIYDITSKLKTKLLGNSVDVYPVGRTRVTLKKDGVVLDLVPPLTKIHNLIFGRTWVDSPGEMVMTNLTTGDKVVLYFQPCGWFGSGRYEVDGYVYSAAEEPKIMMTGKWNEKMSYQPCDAEGEPLPGTELKEVWHLADVPKNDNFQYTHFAHKINSFDTAPAKLLASDSRIRPDRYSLEQGDLSKAGSEKHSLEERQRAEKRTRETKGQKFTPRWFDLTDEITPTPWGDIEVYQYNGKYNEHRDTAESSSSASNETDLKSIEFNPWQYGNISTE

SEQ ID NO: 33120 - protein, 442 aa, Arabidopsis thaliana
  misc_feature (1)..(442): Ceres Seq. ID no. 13602134
MTSGFSMFGTAVSRSVNGVQGNEGVEVINPEGGKEDAEEEAQKGRWKDEERDSYWKMMQKYIGSDITSMVTLPVVIFEPMTMLQKMAEIMEYSHLLDQADECEDPYLRLVYASSWAISVYYAFQRTWKPFNPILGETYEMVNHGGISFISEQVSHHPPMSAGHAENEHFIYDITSKLKTKLLGNSVDVYPVGRTRVTLKKDGVVLDLVPPLTKIHNLIFGRTWVDSPGEMVMTNLTTGDKVVLYFQPCGWFGSGRYEVDGYVYSAAEEPKIMMTGKWNEKMSYQPCDAEGEPLPGTELKEVWHLADVPKNDNFQYTHFAHKINSFDTAPAKLLASDSRIRPDRYSLEQGDLSKAGSEKHSLEERQRAEKRTRETKGQKFTPRWFDLTDEITPTPWGDIEVYQYNGKYNEHRDTAESSSSASNETDLKSIEFNPWQYGNISTE

SEQ ID NO: 33121 - protein, 436 aa, Arabidopsis thaliana
  misc_feature (1)..(436): Ceres Seq. ID no. 13602135
MFGTAVSRSVNGVQGNEGVEVINPEGGKEDAEEEAQKGRWKDEERDSYWKMMQKYIGSDITSMVTLPVVIFEPMTMLQKMAEIMEYSHLLDQADECEDPYLRLVYASSWAISVYYAFQRTWKPFNPILGETYEMVNHGGISFISEQVSHHPPMSAGHAENEHFIYDITSKLKTKLLGNSVDVYPVGRTRVTLKKDGVVLDLVPPLTKIHNLIFGRTWVDSPGEMVMTNLTTGDKVVLYFQPCGWFGSGRYEVDGYVYSAAEEPKIMMTGKWNEKMSYQPCDAEGEPLPGTELKEVWHLADVPKNDNFQYTHFAHKINSFDTAPAKLLASDSRIRPDRYSLEQGDLSKAGSEKHSLEERQRAEKRTRETKGQKFTPRWFDLTDEITPTPWGDIEVYQYNGKYNEHRDTAESSSSASNETDLKSIEFNPWQYGNISTE

SEQ ID NO: 33122 - DNA, 2234 bp, Arabidopsis thaliana
  misc_feature (1)..(2234): Ceres Seq. ID no. 13602136
atccactttttgtggctgcttactgttttcctcgaaagttccatttttttcttttgctctgcaaacgaaaaagaaccataaatttttctcatatttaaagctctctctttctctcacaactgtgttcacatgaactttctcaccgctttcttctcttcattgaacaaaaaaaaaagctcttaacttttttttcttctttaggtaaaatttgacaaaagctctcaactttcaaactctgtttcttcatcatcatcatcatcaccatggacgccctgcttcaagtttcagttgatgggtttagatttgagaacggatctggatcttgctgcaaacccagaaacaatctcgaatctgggaacaatctcttccctgatttccacgagtctcagaatcagtcttcaccaaacgattcacctccaacggtgtgtttggataactctcctgttctgaagtacatcaatgatatgttgatggacgaagaagacttcgtaggtatatctcgtgacgatttagctttacaagccgctgagagatccttctacgagataattcaacagcaatctccagaatctgatcagaacactagctcctcctccgatcaaaactccggtgaccaagatttctgttttcccagcacaacaacagattcatcagcgttggtttcgagcggagaatcacagagaaagtaccgtcatcggaatgatgaagaagatgatcttgagaacaatcggagaaacaaacaaccagcgatatttgtctcggagatggaagagttagcagtgaagttagaacatgtgttgttggtatgcaaaacgaaccaagaagaagaagaagaaagaacagtaataacgaaacagagtactccaaacagagcaggaagagcaaaaggttcatcgaacaaatcaaagacgcacaaaactaataccgttgatctacgaagtctcttgacgcaatgtgctcaagctgtagcgagctttgaccagagaagagctacagataaactcaaggagataagagcacactcttctagcaatggagatggaacacaaagactagctttttactttgcagaggcgcttgaggcacgtatcactggaaacatctcaccgcctgtttctaatccgtttccttcaagcacgacatcgatggtggacattttgaaagcgtacaagctgtttgttcatacttgtcccatctatgtaactgattacttcgctgcgaacaaatcgatttacgaacttgctatgaaagcaactaagcttcacatagttgattttggagttctctacggctttcaatggccttgtttgttacgagctctgtctaaacgaccgggcggaccaccaatgcttcgggtgactggaatcgagctgccacaagcgggttttcgtccttcagaccgcgttgaagagactggtcgaagactgaaaaggttctgcgatcagtttaatgttccttttgagttcaacttcatagccaaaaaatgggaaaccatcactcttgatgaacttatgatcaatccaggagagacaacggtcgtcaactgcattcatcggttacaatacactcctgatgaaactgtgtcattagactctccaagagacacggttctgaagctattcagagatatcaatcctgacctctttgtgtttgcagagattaacggaatgtacaactctcctttcttcatgacgaggttccgagaagcgctttttcattactcttcactctttgacatgtttgacaccacaatacacgcagaggatgagtacaaaaacaggtcactgttggagagagagttacttgtgagagacgcgatgagcgtgatttcctgcgagggtgcagagcggtttgcgaggcctgaaacctacaagcaatggcgagttaggattttgagagccgggtttaagccagcaactattagcaaacagatcatgaaggaggctaaggaaattgtgaggaaacgttaccatagagattttgtgatcgatagcgataacaattggatgcttcaaggatggaaaggaagagtcatctatgctttttcttgctggaaacctgctgagaagttcacaaacaataatttaaacatctgaaaaatgttacttctcaattacatcatttttgtttcccaatggttttgtagaatatgtttgatcccgtgagtggatgcaactcttttttcctgcaagtacatattgtattcaaatccttgtggaaatgataaattgttt

SEQ ID NO: 33123 - protein, 610 aa, Arabidopsis thaliana
  misc_feature (1)..(610): Ceres Seq. ID no. 13602137
MDALLQVSVDGFRFENGSGSCCKPRNNLESGNNLFPDFHESQNQSSPNDSPPTVCLDNSPVLKYINDMLMDEEDFVGISRDDLALQAAERSFYEIIQQQSPESDQNTSSSSDQNSGDQDFCFPSTTTDSSALVSSGESQRKYRHRNDEEDDLENNRRNKQPAIFVSEMEELAVKLEHVLLVCKTNQEEEEERTVITKQSTPNRAGRAKGSSNKSKTHKTNTVDLRSLLTQCAQAVASFDQRRATDKLKEIRAHSSSNGDGTQRLAFYFAEALEARITGNISPPVSNPFPSSTTSMVDILKAYKLFVHTCPIYVTDYFAANKSIYELAMKATKLHIVDFGVLYGFQWPCLLRALSKRPGGPPMLRVTGIELPQAGFRPSDRVEETGRRLKRFCDQFNVPFEFNFIAKKWETITLDELMINPGETTVVNCIHRLQYTPDETVSLDSPRDTVLKLFRDINPDLFVFAEINGMYNSPFFMTRFREALFHYSSLFDMFDTTIHAEDEYKNRSLLERELLVRDAMSVISCEGAERFARPETYKQWRVRILRAGFKPATISKQIMKEAKEIVRKRYHRDFVIDSDNNWMLQGWKGRVIYAFSCWKPAEKFTNNNLNI

SEQ ID NO: 33124 - protein, 543 aa, Arabidopsis thaliana
  misc_feature (1)..(543): Ceres Seq. ID no. 13602138
MLMDEEDFVGISRDDLALQAAERSFYEIIQQQSPESDQNTSSSSDQNSGDQDFCFPSTTTDSSALVSSGESQRKYRHRNDEEDDLENNRRNKQPAIFVSEMEELAVKLEHVLLVCKTNQEEEEERTVITKQSTPNRAGRAKGSSNKSKTHKTNTVDLRSLLTQCAQAVASFDQRRATDKLKEIRAHSSSNGDGTQRLAFYFAEALEARITGNISPPVSNPFPSSTTSMVDILKAYKLFVHTCPIYVTDYFAANKSIYELAMKATKLHIVDFGVLYGFQWPCLLRALSKRPGGPPMLRVTGIELPQAGFRPSDRVEETGRRLKRFCDQFNVPFEFNFIAKKWETITLDELMINPGETTVVNCIHRLQYTPDETVSLDSPRDTVLKLFRDINPDLFVFAEINGMYNSPFFMTRFREALFHYSSLFDMFDTTIHAEDEYKNRSLLERELLVRDAMSVISCEGAERFARPETYKQWRVRILRAGFKPATISKQIMKEAKEIVRKRYHRDFVIDSDNNWMLQGWKGRVIYAFSCWKPAEKFTNNNLNI

SEQ ID NO: 33125 - protein, 541 aa, Arabidopsis thaliana
  misc_feature (1)..(541): Ceres Seq. ID no. 13602139
MDEEDFVGISRDDLALQAAERSFYEIIQQQSPESDQNTSSSSDQNSGDQDFCFPSTTTDSSALVSSGESQRKYRHRNDEEDDLENNRRNKQPAIFVSEMEELAVKLEHVLLVCKTNQEEEEERTVITKQSTPNRAGRAKGSSNKSKTHKTNTVDLRSLLTQCAQAVASFDQRRATDKLKEIRAHSSSNGDGTQRLAFYFAEALEARITGNISPPVSNPFPSSTTSMVDILKAYKLFVHTCPIYVTDYFAANKSIYELAMKATKLHIVDFGVLYGFQWPCLLRALSKRPGGPPMLRVTGIELPQAGFRPSDRVEETGRRLKRFCDQFNVPFEFNFIAKKWETITLDELMINPGETTVVNCIHRLQYTPDETVSLDSPRDTVLKLFRDINPDLFVFAEINGMYNSPFFMTRFREALFHYSSLFDMFDTTIHAEDEYKNRSLLERELLVRDAMSVISCEGAERFARPETYKQWRVRILRAGFKPATISKQIMKEAKEIVRKRYHRDFVIDSDNNWMLQGWKGRVIYAFSCWKPAEKFTNNNLNI

SEQ ID NO: 33126 - DNA, 1453 bp, Arabidopsis thaliana
  misc_feature (1)..(1453): Ceres Seq. ID no. 13602144
atctgttttccagtttcgatttcgaatcaaatatgaagctgaaagagtttttctgaatctttgtctttgtatccgttatctgaattctattcgccatggaagctgtgcttctctgctcgaagcttgttcctagagcggcgtcgttggaagggaaccaaaagttttcgttcaggcatttgaacaaacaccttaagtgcaattcccttcgtgctgattccagagacactccgttgctccgaggttttgaagcgataaagagtccgtctatctggagttgtgcgccgttcccagtgagaaaaggttcatgggttccacccagatgctcgatttctagctcgactgtttccgattccgataaccctttccttagccaatttcgaaccttctcttttgggtcaatggtgaagaaagttcgtgagttgaaagtgaagcccatggatgttgtgaagttaactcttttgctatcgattttgactgtggctgcaaaaaagactttgactttggtcttggacccattcttctggatgtattttagctggacatggttgttctggccttggtttatcgctgtgggtcttgcgggttatggaatttactgtttccgtaagcattggcttggcgaagccaatgcctttgagcagcttggtattgtaacttcagtcttcacatggctaacacttgtgcctcctgcttatttcaatggttatcttgaaggctggccttatgtgttcttcttggcgtatcattacttctttttcttcaatgttagcgtgagaaaacgcctctatggagatttctatgctcgcactcatgatcccaaatgggatgtgaacacgcctctgtggtctcggattttgtttggtgttggcatcatggttggacattggcttgcagcttttgaagggcctgagcttcaccgattaccagggggttgggccaatgtagggatatggattttgattgtgattacaatgcttatgcattatgattcaacgctatatcttgctagatattctgaaaaggttgttgttccaacggctgttgtgcaatttggtccttatagatgggtcaggcatccgatatatgcttctacgatgcttcttttcgctgcatactgcactgctctgcgtgcgcctttgagtctgttgtttcttttagcggtttgtttggtttactacaacaagaaggcaaagatggaagaagaattgatggtggagagtttcggacaaagctattcggattatgctgataaggttaggcacaagttcattccttttgtttactagtagtggtatagaggaacctgtgttgtgtctaattttctggtatctatcagccaaagatgtatgaatgaagatgagttctcatttttattggaatgttaggcttgtgaaaaggatatgcttttatgctattcatggttctcttaaattctatttcaagttatttttcc

SEQ ID NO: 33127 - protein, 396 aa, Arabidopsis thaliana
  misc_feature (1)..(396): Ceres Seq. ID no. 13602145
MEAVLLCSKLVPRAASLEGNQKFSFRHLNKHLKCNSLRADSRDTPLLRGFEAIKSPSIWSCAPFPVRKGSWVPPRCSISSSTVSDSDNPFLSQFRTFSFGSMVKKVRELKVKPMDVVKLTLLLSILTVAAKKTLTLVLDPFFWMYFSWTWLFWPWFIAVGLAGYGIYCFRKHWLGEANAFEQLGIVTSVFTWLTLVPPAYFNGYLEGWPYVFFLAYHYFFFFNVSVRKRLYGDFYARTHDPKWDVNTPLWSRILFGVGIMVGHWLAAFEGPELHRLPGGWANVGIWILIVITMLMHYDSTLYLARYSEKVVVPTAVVQFGPYRWVRHPIYASTMLLFAAYCTALRAPLSLLFLLAVCLVYYNKKAKMEEELMVESFGQSYSDYADKVRHKFIPFVY

SEQ ID NO: 33128 - protein, 295 aa, Arabidopsis thaliana
  misc_feature (1)..(295): Ceres Seq. ID no. 13602146
MVKKVRELKVKPMDVVKLTLLLSILTVAAKKTLTLVLDPFFWMYFSWTWLFWPWFIAVGLAGYGIYCFRKHWLGEANAFEQLGIVTSVFTWLTLVPPAYFNGYLEGWPYVFFLAYHYFFFFNVSVRKRLYGDFYARTHDPKWDVNTPLWSRILFGVGIMVGHWLAAFEGPELHRLPGGWANVGIWILIVITMLMHYDSTLYLARYSEKVVVPTAVVQFGPYRWVRHPIYASTMLLFAAYCTALRAPLSLLFLLAVCLVYYNKKAKMEEELMVESFGQSYSDYADKVRHKFIPFVY

SEQ ID NO: 33129 - protein, 283 aa, Arabidopsis thaliana
  misc_feature (1)..(283): Ceres Seq. ID no. 13602147
MDVVKLTLLLSILTVAAKKTLTLVLDPFFWMYFSWTWLFWPWFIAVGLAGYGIYCFRKHWLGEANAFEQLGIVTSVFTWLTLVPPAYFNGYLEGWPYVFFLAYHYFFFFNVSVRKRLYGDFYARTHDPKWDVNTPLWSRILFGVGIMVGHWLAAFEGPELHRLPGGWANVGIWILIVITMLMHYDSTLYLARYSEKVVVPTAVVQFGPYRWVRHPIYASTMLLFAAYCTALRAPLSLLFLLAVCLVYYNKKAKMEEELMVESFGQSYSDYADKVRHKFIPFVY

SEQ ID NO: 33130 - DNA, 1633 bp, Arabidopsis thaliana
  misc_feature (1)..(1633): Ceres Seq. ID no. 13602150
atggatcccacaaacagcagacacggcgcttcttttgaattttctactcggcgttttacactttccacgtttggtcaaaacgctccttctctatacgtaacgaccgtttataactccgctatcatctacccagtcaaacactcaccacgtgtctatttaccgtctaatccgacaccgttaattccgctcctaagaatcgccttaaaaaccacgttttcattttctcatcttcaaacctctctgtcattactctggtcagcgattcttctttcttcttcttctcagatcctttcaccgagtaagaagattttaaagatgccgtcaacgccgacgacgccgactacaacaacgccgatcacggcttcgtattggtgttacagctgtacgcgtttcgtcagcgtttgggctgatcaaggcacaacaaccgtcggtagcgtcgcttgccctcactgcgacggcggttttatcgaacagattaacgattcttcctccgccgctaccgaattaacgattccggcttctactgaagtaagatcgatcaataacaaccgtagatccgtgattagacgccggagatccggtcgtcgtccgtcctttaatccggtcatcgtacttcaaggaggcgccggcgagagagaagagggagaagaaggagatgcggctagagatcgacgcgcttttgagttttattacgatgacggatccggatcgggtcttagaccgcttccggattctgtatctgagatcttgatgggatctggattcgagcggttacttgaacagctaagccaaatcgaagcgtcggctactggaattggtagatctggaaaccctccggcgtctaaatcggcgattgagtctttacctagagtcgaaatctcggattgccacataggctcggaggctaattgcgctgtttgcacggagattttcgagacggagacggaggcgcgtgagatgccgtgtaaacaccttttccacgacgattgcatcgtaccgtggctatcgattcgaaactcttgtcccgtgtgcagattcgagctaccttcagagcctaatcgacggagcaacaacaacgaggaggataacgccgtggggatgacgatttggagacttcccggtggtggattcgccgtagggaggtttaacgcagcaatgagagacggagagagagttttgccagtggtgttaacagaaatggatggtggtgggattggtaatagccaggatggtcctagacggatctcatgggttaggtcacacggtacactcgaatcggatagtaacggtactggctcaggttccggctccggtggaagattgaggaggatggttcgtggaatggtgtcgttaatgaggagagtgagaccaaaccgtagctcttcttcttcatcagctgcgatatcaacttcttctgataatctggatttgaacattgaagtagaatctagggttttggataggtcaaattcagtgatgagaagatacttcagaagaaacagaagtaacagggattcttcgtcttcagttcttcattgattcagaaatatatatatattattttttggtttgttcattcaacaatgtaaatataagattcagaagaaaaagattggtgcttcgttttctatta

SEQ ID NO: 33131 - protein, 512 aa, Arabidopsis thaliana
  misc_feature (1)..(512): Ceres Seq. ID no. 13602151
MDPTNSRHGASFEFSTRRFTLSTFGQNAPSLYVTTVYNSAIIYPVKHSPRVYLPSNPTPLIPLLRIALKTTFSFSHLQTSLSLLWSAILLSSSSQILSPSKKILKMPSTPTTPTTTTPITASYWCYSCTRFVSVWADQGTTTVGSVACPHCDGGFIEQINDSSSAATELTIPASTEVRSINNNRRSVIRRRRSGRRPSFNPVIVLQGGAGEREEGEEGDAARDRRAFEFYYDDGSGSGLRPLPDSVSEILMGSGFERLLEQLSQIEASATGIGRSGNPPASKSAIESLPRVEISDCHIGSEANCAVCTEIFETETEAREMPCKHLFHDDCIVPWLSIRNSCPVCRFELPSEPNRRSNNNEEDNAVGMTIWRLPGGGFAVGRFNAAMRDGERVLPVVLTEMDGGGIGNSQDGPRRISWVRSHGTLESDSNGTGSGSGSGGRLRRMVRGMVSLMRRVRPNRSSSSSSAAISTSSDNLDLNIEVESRVLDRSNSVMRRYFRRNRSNRDSSSSVLH

SEQ ID NO: 33132 - protein, 407 aa, Arabidopsis thaliana
  misc_feature (1)..(407): Ceres Seq. ID no. 13602152
MPSTPTTPTTTTPITASYWCYSCTRFVSVWADQGTTTVGSVACPHCDGGFIEQINDSSSAATELTIPASTEVRSINNNRRSVIRRRRSGRRPSFNPVIVLQGGAGEREEGEEGDAARDRRAFEFYYDDGSGSGLRPLPDSVSEILMGSGFERLLEQLSQIEASATGIGRSGNPPASKSAIESLPRVEISDCHIGSEANCAVCTEIFETETEAREMPCKHLFHDDCIVPWLSIRNSCPVCRFELPSEPNRRSNNNEEDNAVGMTIWRLPGGGFAVGRFNAAMRDGERVLPVVLTEMDGGGIGNSQDGPRRISWVRSHGTLESDSNGTGSGSGSGGRLRRMVRGMVSLMRRVRPNRSSSSSSAAISTSSDNLDLNIEVESRVLDRSNSVMRRYFRRNRSNRDSSSSVLH

SEQ ID NO: 33133 - protein, 262 aa, Arabidopsis thaliana
  misc_feature (1)..(262): Ceres Seq. ID no. 13602153
MGSGFERLLEQLSQIEASATGIGRSGNPPASKSAIESLPRVEISDCHIGSEANCAVCTEIFETETEAREMPCKHLFHDDCIVPWLSIRNSCPVCRFELPSEPNRRSNNNEEDNAVGMTIWRLPGGGFAVGRFNAAMRDGERVLPVVLTEMDGGGIGNSQDGPRRISWVRSHGTLESDSNGTGSGSGSGGRLRRMVRGMVSLMRRVRPNRSSSSSSAAISTSSDNLDLNIEVESRVLDRSNSVMRRYFRRNRSNRDSSSSVLH

SEQ ID NO: 33134 - DNA, 2026 bp, Arabidopsis thaliana
  misc_feature (1)..(2026): Ceres Seq. ID no. 13602192
atgattattacaaacgctcatgtggtggctaatcacatattggtgctagtcataaagcgtggctcaccaaagaagtacaaagcagaagttaaagctattgggcgtgaatgtgatttggctattttggtgatcgaaagcaaagagttttgggaagatatgaatcctttggagcttggagacatgccctttttgcaagaatcagtaaatgttattggctatccaacaggtggtgagaatatctccgttacaaaaggtgttgtgtctagaatagaatcaatggattatgctcacggtgccattaatctaccggcaatacaaacagatgcagcaatgaaccctggcaatagtggtggtccggtttgcataggaaacaaagttgttggtgtagcatttcaaacccttggacattctaataacatagggtgcttaatcccagctccagtggttaaacattttataaccggtgttgaaaaaaccggtcaatacgttggcttctgctcgctaaatctatcataccaacatatggatgcacaaactcgtagtcattttaagatgaattctgagatgacagggatccttatatacaatattaatcaacattcggatgctctcaatattcttaaaaaatatgacgttattctttcaatcgatggcgttgctatagaaaatgatggtacagttattataccaaacagagaaaggacaaggttggatgatttggtttctttgaagcaattaggtgaaacaatcttacttaaaattttaagagagggaaaaatgcatgagttcaatattactctgaggccagtgcaacggctagttccagcaggtcaaattgacaacaacccaagttattacatattcgctggttttgtctttgtgcctctccgtaaacaacattttaaaggttccaacggtgaacaaattgtagtgatttctgaggtattagctgatgtgatcaatgtagaatactacatgtacaagcatttgaaggtgaacagcgtcaacaaagtgaaggtggagaatctaaagcatttgtgtgaactcatagagaaatgttgcaccaaggatttgaggctagaattaggagatggtcgagtaataatcttggattatcagtttgcgaaaagttccacttctttgattttggaacgtcatagagtaccatgggccatgtccaaagatctcatgactgatcaatcgaccacttgttcgaagagagtctatgcttccttaagcttaagtgaatcggtgacgatgatgaaggagaaggcgaaagaagggaagagtctgtttgggtctccgacgttcgttgatcttggaaacggacggctcagatgcgtcgagactggtcacgaggttttagcgggagacgtagaatcatacgctcgtaacaaacggtgtcgtttaggactcatcaatcacgctttgtctctaggaaagcctcctctcaacatgttctcgcaatgcccactttctcgcatcgaaaatggtttaaagttctcgaaacttgtgtgcaagctaactggagatactgtgaacaagaacgaggaacatatctggaaacacgtgaatgggaaaagatttcttcacaaattagagcaagtggaaagaggagctggatcaagcggaaggactgaggaaacacaagtaaacaatccaagacacaataaggaagattctggttctgaggaatccgacttttggatgcctaagtcaagttctgattcagagttagatgaagagactgatgaagaaaactgtaaaggttctcattgtgatgacaaagaatctgaagagctctcagaaagaacaaagagaatgtcactagagattggaccaagtagctttgcttctaggaagaaaaagagtaagaatgatgagttgtcttaagatgttgtggacaaaaaaagaaagagcacaattttgtttgtaagaaagagctcttttgaaaattatgtgagagctaaatttcaaaaccgaatcatccataatcattaatcacaagttcaagccaaatttaaag

SEQ ID NO: 33135 - protein, 630 aa, Arabidopsis thaliana
  misc_feature (1)..(630): Ceres Seq. ID no. 13602193
MIITNAHVVANHILVLVIKRGSPKKYKAEVKAIGRECDLAILVIESKEFWEDMNPLELGDMPFLQESVNVIGYPTGGENISVTKGVVSRIESMDYAHGAINLPAIQTDAAMNPGNSGGPVCIGNKVVGVAFQTLGHSNNIGCLIPAPVVKHFITGVEKTGQYVGFCSLNLSYQHMDAQTRSHFKMNSEMTGILIYNINQHSDALNILKKYDVILSIDGVAIENDGTVIIPNRERTRLDDLVSLKQLGETILLKILREGKMHEFNITLRPVQRLVPAGQIDNNPSYYIFAGFVFVPLRKQHFKGSNGEQIVVISEVLADVINVEYYMYKHLKVNSVNKVKVENLKHLCELIEKCCTKDLRLELGDGRVIILDYQFAKSSTSLILERHRVPWAMSKDLMTDQSTTCSKRVYASLSLSESVTMMKEKAKEGKSLFGSPTFVDLGNGRLRCVETGHEVLAGDVESYARNKRCRLGLINHALSLGKPPLNMFSQCPLSRIENGLKFSKLVCKLTGDTVNKNEEHIWKHVNGKRFLHKLEQVERGAGSSGRTEETQVNNPRHNKEDSGSEESDFWMPKSSSDSELDEETDEENCKGSHCDDKESEELSERTKRMSLEIGPSSFASRKKKSKNDELS

SEQ ID NO: 33136 - protein, 578 aa, Arabidopsis thaliana
  misc_feature (1)..(578): Ceres Seq. ID no. 13602194
MNPLELGDMPFLQESVNVIGYPTGGENISVTKGVVSRIESMDYAHGAINLPAIQTDAAMNPGNSGGPVCIGNKVVGVAFQTLGHSNNIGCLIPAPVVKHFITGVEKTGQYVGFCSLNLSYQHMDAQTRSHFKMNSEMTGILIYNINQHSDALNILKKYDVILSIDGVAIENDGTVIIPNRERTRLDDLVSLKQLGETILLKILREGKMHEFNITLRPVQRLVPAGQIDNNPSYYIFAGFVFVPLRKQHFKGSNGEQIVVISEVLADVINVEYYMYKHLKVNSVNKVKVENLKHLCELIEKCCTKDLRLELGDGRVIILDYQFAKSSTSLILERHRVPWAMSKDLMTDQSTTCSKRVYASLSLSESVTMMKEKAKEGKSLFGSPTFVDLGNGRLRCVETGHEVLAGDVESYARNKRCRLGLINHALSLGKPPLNMFSQCPLSRIENGLKFSKLVCKLTGDTVNKNEEHIWKHVNGKRFLHKLEQVERGAGSSGRTEETQVNNPRHNKEDSGSEESDFWMPKSSSDSELDEETDEENCKGSHCDDKESEELSERTKRMSLEIGPSSFASRKKKSKNDELS

SEQ ID NO: 33137 - protein, 570 aa, Arabidopsis thaliana
  misc_feature (1)..(570): Ceres Seq. ID no. 13602195
MPFLQESVNVIGYPTGGENISVTKGVVSRIESMDYAHGAINLPAIQTDAAMNPGNSGGPVCIGNKVVGVAFQTLGHSNNIGCLIPAPVVKHFITGVEKTGQYVGFCSLNLSYQHMDAQTRSHFKMNSEMTGILIYNINQHSDALNILKKYDVILSIDGVAIENDGTVIIPNRERTRLDDLVSLKQLGETILLKILREGKMHEFNITLRPVQRLVPAGQIDNNPSYYIFAGFVFVPLRKQHFKGSNGEQIVVISEVLADVINVEYYMYKHLKVNSVNKVKVENLKHLCELIEKCCTKDLRLELGDGRVIILDYQFAKSSTSLILERHRVPWAMSKDLMTDQSTTCSKRVYASLSLSESVTMMKEKAKEGKSLFGSPTFVDLGNGRLRCVETGHEVLAGDVESYARNKRCRLGLINHALSLGKPPLNMFSQCPLSRIENGLKFSKLVCKLTGDTVNKNEEHIWKHVNGKRFLHKLEQVERGAGSSGRTEETQVNNPRHNKEDSGSEESDFWMPKSSSDSELDEETDEENCKGSHCDDKESEELSERTKRMSLEIGPSSFASRKKKSKNDELS

SEQ ID NO: 33138 - DNA, 2010 bp, Arabidopsis thaliana
  misc_feature (1)..(2010): Ceres Seq. ID no. 13602208
ataagaatctctgctttaccttttcttttcaaagggtttcattttgattctagggttgttctaaatgcgacattttgactgatgggtctttgttgaatttgaagagagcaaaagagaaagagattgttctaatggagcctccaacgggaatcttggcttctctgtggcaatttatactcttcattccttatttcactggtttactgcttctcggtgtcattaaaggtatcgttttatgcccgcttatatgccttactgtggctattggaaactctgcaatcatcttaggccttttaccagtacacgcgatttggactctatattcgatagcgagtgctaaacagttaggaccaatcctgaagatctttctgtgtttatgcgttcctcttggtgtcattctctggcttgtggttagtatcttaggaagtgttcttggaggagctatttatggatttctttctccaatatttgctactttcgatgctgttggtgaagggaagtctaatccgtttttccattgcttttatgatggaacttggagcactgttcaaggcagtttcaccgttgtttgtgattttaaagatgtttgctttcactcctacttttcttttatggatgatcttcgaacatctactgcgaaccgtcactattatgaaataaggttacttcaaattccaggtgctgtgattgttgcggttctcggaattcttgttgatttcccagtgatttcactcttagcattgtgtaaaagcccgtacatgttgttcaaagggtggcaccgtttgtttcatgatctcattggacgtgaaggtcctttcttggaaacaatgtgtgtcccaatcgctggccttgtgatcttactctggcctttagctgttgttggagcagttttaggatccgtggtctctagtgtcttccttggtgcttatggcggtgtagtctcatatcaggagtcatcgttcttcttcggtctctgctatgttgttgcttctgtttctatttacgatgagtatagcaacgatgttcttgatatgcctgaaggttcttgctttcccaggccaatatatcgaagaaacgaagagggcgctagtacggcattttctggtggtctttcaagaccgaactccttcaagacaactccatcaagaggaggatcaaacaaaggcccaatgattgacctgaaaccgcttgatcttttggaggctctatttgtggaatgtaggcggcacggagagattatggtaacgaaagggattataaattcaaaagacattgaagaagctaaatctagcaaaggcagtcaagtgatcagctttggcttacctgcttattctcttcttcacgagcttttacgctctatcaaatctaactccaccggtttattactcggtgacggtgtaacggagataactaccagaaaccgcccaaaagatgcgttttttgattggtttctgaatccgtttttgatccttaaagaccagatcgaagctgcaaacctatccgaggaagaagaagagtatcttggtaaattggtattactctttggagattcagagagacttaaaagctccattgttgaatctgaatctcctcctctaactgaactcagaaaagccgaacttgatgcctttgctcgcaggcttcaaggattaaccaaatcagtatcaagatatccaacattcagaagacattttgtggaactagtcaagaaactatcaaatgatctagacaataaacataaccgttttgaaggcggttcgagatcagttccacgtcccgggaaaacggtgtctcggattttcagccaaaaatcgttcaagaaaaagacaagtagcaatgggtcagatcaagattcaccaaacagagggttaagagacattgatattgtgtaagtaaatgttatgcgaccagaattagaccgaaacttcgtctgcttttagctctgtaatgataaatttatacagattccaagtgaatatgaaactgtttcatttatctaacaaatgtttt

SEQ ID NO: 33139 - protein, 586 aa, Arabidopsis thaliana
  misc_feature (1)..(586): Ceres Seq. ID no. 13602209
MEPPTGILASLWQFILFIPYFTGLLLLGVIKGIVLCPLICLTVAIGNSAIILGLLPVHAIWTLYSIASAKQLGPILKIFLCLCVPLGVILWLVVSILGSVLGGAIYGFLSPIFATFDAVGEGKSNPFFHCFYDGTWSTVQGSFTVVCDFKDVCFHSYFSFMDDLRTSTANRHYYEIRLLQIPGAVIVAVLGILVDFPVISLLALCKSPYMLFKGWHRLFHDLIGREGPFLETMCVPIAGLVILLWPLAVVGAVLGSVVSSVFLGAYGGVVSYQESSFFFGLCYVVASVSIYDEYSNDVLDMPEGSCFPRPIYRRNEEGASTAFSGGLSRPNSFKTTPSRGGSNKGPMIDLKPLDLLEALFVECRRHGEIMVTKGIINSKDIEEAKSSKGSQVISFGLPAYSLLHELLRSIKSNSTGLLLGDGVTEITTRNRPKDAFFDWFLNPFLILKDQIEAANLSEEEEEYLGKLVLLFGDSERLKSSIVESESPPLTELRKAELDAFARRLQGLTKSVSRYPTFRRHFVELVKKLSNDLDNKHNRFEGGSRSVPRPGKTVSRIFSQKSFKKKTSSNGSDQDSPNRGLRDIDIV

SEQ ID NO: 33140 - protein, 426 aa, Arabidopsis thaliana
  misc_feature (1)..(426): Ceres Seq. ID no. 13602210
MDDLRTSTANRHYYEIRLLQIPGAVIVAVLGILVDFPVISLLALCKSPYMLFKGWHRLFHDLIGREGPFLETMCVPIAGLVILLWPLAVVGAVLGSVVSSVFLGAYGGVVSYQESSFFFGLCYVVASVSIYDEYSNDVLDMPEGSCFPRPIYRRNEEGASTAFSGGLSRPNSFKTTPSRGGSNKGPMIDLKPLDLLEALFVECRRHGEIMVTKGIINSKDIEEAKSSKGSQVISFGLPAYSLLHELLRSIKSNSTGLLLGDGVTEITTRNRPKDAFFDWFLNPFLILKDQIEAANLSEEEEEYLGKLVLLFGDSERLKSSIVESESPPLTELRKAELDAFARRLQGLTKSVSRYPTFRRHFVELVKKLSNDLDNKHNRFEGGSRSVPRPGKTVSRIFSQKSFKKKTSSNGSDQDSPNRGLRDIDIV

SEQ ID NO: 33141 - protein, 377 aa, Arabidopsis thaliana
  misc_feature (1)..(377): Ceres Seq. ID no. 13602211
MLFKGWHRLFHDLIGREGPFLETMCVPIAGLVILLWPLAVVGAVLGSVVSSVFLGAYGGVVSYQESSFFFGLCYVVASVSIYDEYSNDVLDMPEGSCFPRPIYRRNEEGASTAFSGGLSRPNSFKTTPSRGGSNKGPMIDLKPLDLLEALFVECRRHGEIMVTKGIINSKDIEEAKSSKGSQVISFGLPAYSLLHELLRSIKSNSTGLLLGDGVTEITTRNRPKDAFFDWFLNPFLILKDQIEAANLSEEEEEYLGKLVLLFGDSERLKSSIVESESPPLTELRKAELDAFARRLQGLTKSVSRYPTFRRHFVELVKKLSNDLDNKHNRFEGGSRSVPRPGKTVSRIFSQKSFKKKTSSNGSDQDSPNRGLRDIDIV

SEQ ID NO: 33142 - DNA, 918 bp, Arabidopsis thaliana
  misc_feature (1)..(918): Ceres Seq. ID no. 13602255
aacattcatttggaggaggagacctgaatctttgcaatctcgcaacagaaacggcgatgggaagatcagctctgattcacttgcttcgctcccaatcccgacgtctctcttcctccaccttcacttcaggatatcatcaccggtcaatagcaggatcatggtcatcatcagtgaacccgaaggtcagattccaggttccatcccttagccagagaagctgggcatcatttggagcaaagactagagaggacgatgatgagcacaagatcagcatcggaccccaagagaagaaagaagagaaggatggaggtgtggtttactatggaccaatctcatcaaccataaagaaagtgaaactcctctcactctccacttgctgtctatcagtctctcttggcccggtcatcactttcatgacttccccgggactgaatgtgatcatgaaaggtgctgttgcctctactgtgatcttccttagcgcatccacaaccgctgctctccactggtttgttagtccctacgtgcacaagctgaggtggcagcctggttcagacacttttgaggtcgagatgatgacttggctcggcacatttagcgcaaagacactgaaattctcagacatacgttatccagacacgcaaagaccgtatgtgagcttcaaggctgatgggaatttctactttgtggatgcagatcattgccctaacaaggcattgttggctaggctcactcctccaaaggatgctcatgactctgctttcaagaacttgtaatccaaattcgtttcttttgttatactctttttttgggtgtggatttttgttgggtttgtaagctctttaagatacttggatacctcctccccttctcatcactaatacccaaaaaaatgcaaataagaaaagaccggtttgatcc

SEQ ID NO: 33143 - protein, 256 aa, Arabidopsis thaliana
  misc_feature (1)..(256): Ceres Seq. ID no. 13602256
HSFGGGDLNLCNLATETAMGRSALIHLLRSQSRRLSSSTFTSGYHHRSIAGSWSSSVNPKVRFQVPSLSQRSWASFGAKTREDDDEHKISIGPQEKKEEKDGGVVYYGPISSTIKKVKLLSLSTCCLSVSLGPVITFMTSPGLNVIMKGAVASTVIFLSASTTAALHWFVSPYVHKLRWQPGSDTFEVEMMTWLGTFSAKTLKFSDIRYPDTQRPYVSFKADGNFYFVDADHCPNKALLARLTPPKDAHDSAFKNL

SEQ ID NO: 33144 - protein, 238 aa, Arabidopsis thaliana
  misc_feature (1)..(238): Ceres Seq. ID no. 13602257
MGRSALIHLLRSQSRRLSSSTFTSGYHHRSIAGSWSSSVNPKVRFQVPSLSQRSWASFGAKTREDDDEHKISIGPQEKKEEKDGGVVYYGPISSTIKKVKLLSLSTCCLSVSLGPVITFMTSPGLNVIMKGAVASTVIFLSASTTAALHWFVSPYVHKLRWQPGSDTFEVEMMTWLGTFSAKTLKFSDIRYPDTQRPYVSFKADGNFYFVDADHCPNKALLARLTPPKDAHDSAFKNL

SEQ ID NO: 33145 - DNA, 889 bp, Arabidopsis thaliana
  misc_feature (1)..(889): Ceres Seq. ID no. 13602258
gtttcacgaacaaagaggcctgagtataaaaaaacaaatcggacgcttcgagtttttcttgaggaagaatccacacacacacagaagaagaatctcatcacgaattttagctatgggttggatctggattgacgattcatccgcctctaaagccggtgctgatctcaccgataaaccgctcggagattctgccgccgccgccgaaaattgctccacgaccacggtggtaagatctcagtgcaagacggaggaggtcgagcctggaaagttcgtcaggaaatgcgacaaaacagaagaaatcctccgccactgttttgggaagccctctgaagtcgttcaatccaacacagagcacacagaagaggatgtgacagaccagatggtgggaagatccgctcttccgaatcagtttgaggataaaaacccgctaaacttcccgggactccgcagagatgtagacgccatcgaacgccatttcttgagcggaatgaagagtttctttgatgcggctgaagagatgacaagcagcttatttgatatcatgggagaccatcacccaagcaccaggagaggagggatacccattgaaaaccatcccaaggtagaggagcaccgcaatgacgaaactgcccctacacgaccacactcctctggcgagattgatctctcgggcttggccaaggacgtttgagaaaggtcgtctgcttcttcttcttcttctttttttttttcacaaaggtcgtcttgttctagcttttggcatatataatcttaaaaatgtaatgtgactttctaagaagcgtggggattgtagtctaatgttagcggcttgcacgtttttccgagtgggtgctactactatctatcaatatcatcatactactatatt

SEQ ID NO: 33146 - protein, 229 aa, Arabidopsis thaliana
  misc_feature (1)..(229): Ceres Seq. ID no. 13602259
FHEQRGLSIKKQIGRFEFFLRKNPHTHRRRISSRILAMGWIWIDDSSASKAGADLTDKPLGDSAAAAENCSTTTVVRSQCKTEEVEPGKFVRKCDKTEEILRHCFGKPSEVVQSNTEHTEEDVTDQMVGRSALPNQFEDKNPLNFPGLRRDVDAIERHFLSGMKSFFDAAEEMTSSLFDIMGDHHPSTRRGGIPIENHPKVEEHRNDETAPTRPHSSGEIDLSGLAKDV

SEQ ID NO: 33147 - protein, 192 aa, Arabidopsis thaliana
  misc_feature (1)..(192): Ceres Seq. ID no. 13602260
MGWIWIDDSSASKAGADLTDKPLGDSAAAAENCSTTTVVRSQCKTEEVEPGKFVRKCDKTEEILRHCFGKPSEVVQSNTEHTEEDVTDQMVGRSALPNQFEDKNPLNFPGLRRDVDAIERHFLSGMKSFFDAAEEMTSSLFDIMGDHHPSTRRGGIPIENHPKVEEHRNDETAPTRPHSSGEIDLSGLAKDV

SEQ ID NO: 33148 - DNA, 1224 bp, Arabidopsis thaliana
  misc_feature (1)..(1224): Ceres Seq. ID no. 13602265
gtattccaattttagaacttacgcgtcttcataatcttcctctttttttctttgtctttgatattcaaagtttttgtttattttttctttgcttaacccggagagacaccctctccataaatttagttttgatccctctgggttccttgaagaaaaaaacaccaattccattcatattcttcttcatacgttcaataattcttacgaggacgagatcttcctaacgtctttgatcttcttcattaggagataagtctaaactggtcgaagatgttgggagatttcatcatcagactccttgtattgatattagggtacacatacccagcattcgaatgctttaaaacggtggagaagaacaaagttgatatcgaggaactcagattttggtgccaatactggatacttttggcgctaatttcatcattcgagagggttggcgatttttttatctcatggttaccgttatacggagagatgaaagtagtcttcttcgtatatctctggtaccctaaaacaaagggaacgagacatgtgtatgaaacattgttgaagccatacatggctcaacacgagacagagattgacagaaagatcatggagttgcgagctcgagcttgggactttttcatcttttacttcaacaacttcgcccaggccggtcaatccaccttgatccagggttttcagtacgtactcgcccaatcggtccggttctctgccgctgcagctaaccaaccgccaacggagaggaacgtgaacatgaacgcgcagtcaccggtggagatggacaatgatcctccatcaccgcgcgctccaagaccgctgaacaaatcactatctgcgttgcgatcgctagagaagcaaacaagcagagggaggaagtggccgccaccaacaccaccaccaacaccaggccgagactccgccggaacatttaacggtgatgatggagtcaacattcctgatacaattccgggatcacccctcactgatgctcgagctaagctgcgacgttctaactccagaactcagccagcggcatagtaacgcaaacgtacatatacgtgactcgacaaagaaacccttttcgtttgtttaaagatatatagggaaagaaaagtgaatgaaagttttgaattgaaacaaaacagatttttttttttttttcatgttttctgtaaattgaagcagtaagtattaatacagcgagaatatttgtgt

SEQ ID NO: 33149 - protein, 258 aa, Arabidopsis thaliana
  misc_feature (1)..(258): Ceres Seq. ID no. 13602266
MLGDFIIRLLVLILGYTYPAFECFKTVEKNKVDIEELRFWCQYWILLALISSFERVGDFFISWLPLYGEMKVVFFVYLWYPKTKGTRHVYETLLKPYMAQHETEIDRKIMELRARAWDFFIFYFNNFAQAGQSTLIQGFQYVLAQSVRFSAAAANQPPTERNVNMNAQSPVEMDNDPPSPRAPRPLNKSLSALRSLEKQTSRGRKWPPPTPPPTPGRDSAGTFNGDDGVNIPDTIPGSPLTDARAKLRRSNSRTQPAA

SEQ ID NO: 33150 - protein, 189 aa, Arabidopsis thaliana
  misc_feature (1)..(189): Ceres Seq. ID no. 13602267
MKVVFFVYLWYPKTKGTRHVYETLLKPYMAQHETEIDRKIMELRARAWDFFIFYFNNFAQAGQSTLIQGFQYVLAQSVRFSAAAANQPPTERNVNMNAQSPVEMDNDPPSPRAPRPLNKSLSALRSLEKQTSRGRKWPPPTPPPTPGRDSAGTFNGDDGVNIPDTIPGSPLTDARAKLRRSNSRTQPAA

SEQ ID NO: 33151 - protein, 161 aa, Arabidopsis thaliana
  misc_feature (1)..(161): Ceres Seq. ID no. 13602268
MAQHETEIDRKIMELRARAWDFFIFYFNNFAQAGQSTLIQGFQYVLAQSVRFSAAAANQPPTERNVNMNAQSPVEMDNDPPSPRAPRPLNKSLSALRSLEKQTSRGRKWPPPTPPPTPGRDSAGTFNGDDGVNIPDTIPGSPLTDARAKLRRSNSRTQPAA

SEQ ID NO: 33152 - DNA, 761 bp, Arabidopsis thaliana
  misc_feature (1)..(761): Ceres Seq. ID no. 13602269
agtgtagcgtcgcatcatacactccttcggttcccgacgaatcgctgcttttttctctctctctctccgtcgctgaaaaatgtcggcaagacctgaaggaagtccgccggaggttacgctcgagacctccatgggtcctttcaccgtcgagatgtattacaaacactccccgagaacttgccggaacttccttgagctatcccggagaggttactatgacaacgttctgtttcacagaatcgtcaaggatttcattgtgcaaggtggggatcctacaggaactggaagaggtggtgaatccatttatggttcgaagtttgaggatgagataaacaaagagttgaagcacacaggagccggaattttatcaatggcgaacgctggtcctaatacaaatgggagtcaatttttcatcaccttagccccacaaccgtccttggatggaaaacacacaatatttggtagagtgtgccgaggcatggaggtgatcaagaggctcggtagtgtccaaaccgataacaccgacaggccgatccatgaagtgaagattctaaggaccaaagtgatcgattgattggggcagaggagtttttgtcaaggagaagaagaagcatttagtaaaccgtttatgacatgaagaactataactctgtgtactgatcccttgatactattgtagactggtttttgtctaagtcttgactctactttgatggaaaaaaatgattgaaatacgttaaatcactctctatttctttttg

SEQ ID NO: 33153 - protein, 164 aa, Arabidopsis thaliana
  misc_feature (1)..(164): Ceres Seq. ID no. 13602270
MSARPEGSPPEVTLETSMGPFTVEMYYKHSPRTCRNFLELSRRGYYDNVLFHRIVKDFIVQGGDPTGTGRGGESIYGSKFEDEINKELKHTGAGILSMANAGPNTNGSQFFITLAPQPSLDGKHTIFGRVCRGMEVIKRLGSVQTDNTDRPIHEVKILRTKVID

SEQ ID NO: 33154 - protein, 147 aa, Arabidopsis thaliana
  misc_feature (1)..(147): Ceres Seq. ID no. 13602271
MGPFTVEMYYKHSPRTCRNFLELSRRGYYDNVLFHRIVKDFIVQGGDPTGTGRGGESIYGSKFEDEINKELKHTGAGILSMANAGPNTNGSQFFITLAPQPSLDGKHTIFGRVCRGMEVIKRLGSVQTDNTDRPIHEVKILRTKVID

SEQ ID NO: 33155 - protein, 140 aa, Arabidopsis thaliana
  misc_feature (1)..(140): Ceres Seq. ID no. 13602272
MYYKHSPRTCRNFLELSRRGYYDNVLFHRIVKDFIVQGGDPTGTGRGGESIYGSKFEDEINKELKHTGAGILSMANAGPNTNGSQFFITLAPQPSLDGKHTIFGRVCRGMEVIKRLGSVQTDNTDRPIHEVKILRTKVID

SEQ ID NO: 33156 - DNA, 2079 bp, Arabidopsis thaliana
  misc_feature (1)..(2079): Ceres Seq. ID no. 13602273
atcacattctctccttattcaacttaaatactacacggccaaaaacatttaacaaacgccactcagatcctgagtctttggatcaatggctatttcaaatgttatttctgtcttattattattgcttgtactaatcaatttaagcaatcaaaatatcaaaggaattgatgcatttcatcagatttacgaagaattgcaatctgaatcagtcgagtcagtgaatcatcttcacagacctagttttcactttcaacctccaaagcattggattaacgatccaaatggtccagtatactacaaaggtctctaccatctcttctaccaatataacaccaaaggtgcggtttggggtaatattatatgggcccattcggtttctaaagacttggttaactgggaggctcttgaaccggctcttagtccttcaaaatggttcgacatcggaggtacatggtccggttcaataacaatcgtaccgggaaaaggaccgattatcctctataccggtgttaaccagaacgaaactcagttgcaaaactatgcaatcccagaggacccatcagacccatacctaaggaaatggattaaaccggacgataacccgattgcaatcccagactatacaatgaacggttcagcattccgtgacccgacaaccgcttggttctccaaagacgggcattggagaaccgtggtagggtcaaaaagaaagcgtagaggaattgcttacatctacagaagccgagatttcaagcattgggtcaaagctaagcacccggttcactctaaacagtcaaccggtatgtgggaatgtcctgatttcttcccggtttccttaaccgatttccgaaacggtttggacttggattacgtcggtccaaacaccaagcatgtgttgaaggttagcttggacattacccggtacgagtattacacgcttggtaaatacgatcttaagaaggaccggtacataccggacggtaatactcccgatggttgggagggtttaagattcgattacggtaatttctacgcttccaagacattctttgactacaaaaagaacagaagaatcttatggggttgggctaatgaatctgacaccgttgaagatgatattttgaagggttgggctggtcttcaggtgattccaagaacggtgctccttgattcaagcaagaagcaacttgtgttttggcctgttgaagagatagagtcattaagaggtaactacgtccgaatgaacaatcatgacatcaagatgggtcaacgcatagaagtcaaaggaatcactcctgctcaagccgatgtggaagtaacgttctatgttggaagtctagagaaagctgagatattcgatccgagtttcacgtggaaaccattggaattgtgtaacattaaaggctcgaatgtgagaggcggtgtaggaccttttggtctgatcacattagcgactcctgatttggaagagtacactcctgtcttctttagagtcttcaacgacactaaaactcataagcctaaagttctcatgtgctccgatgctagaccgtcgtcgttaaagcaagacacgggtttactcgcaaaagataggatgtataaaccatcgtttgctggttttgtggatgttgatatggctgatggaaggatctctctaaggagtttgattgatcattcagtagtagagagctttggagcattaggtaaaacggtgataacatcaagagtgtatccagtgaaagcagtaaaagagaatgcacatttgtatgtctttaacaatggaacacaaactgtgaccatagagagtctcaatgcttggaatatggatcgtcctctgcaaatgaatgatggagctctttaatttagctcttctctctatagtttagctataccgtcttctctctttctcactttttcttatattttcatcttcagtatagtaactgagagatactgtgaaattaggaagaaaaatgtgggagtttctgtgtttacgaacaatttggttgtgatgtccatactttatgtatcgactgttgtatctttctgtctttagtctctcaataaaaataagtttag

SEQ ID NO: 33157 - protein, 591 aa, Arabidopsis thaliana
  misc_feature (1)..(591): Ceres Seq. ID no. 13602274
MAISNVISVLLLLLVLINLSNQNIKGIDAFHQIYEELQSESVESVNHLHRPSFHFQPPKHWINDPNGPVYYKGLYHLFYQYNTKGAVWGNIIWAHSVSKDLVNWEALEPALSPSKWFDIGGTWSGSITIVPGKGPIILYTGVNQNETQLQNYAIPEDPSDPYLRKWIKPDDNPIAIPDYTMNGSAFRDPTTAWFSKDGHWRTVVGSKRKRRGIAYIYRSRDFKHWVKAKHPVHSKQSTGMWECPDFFPVSLTDFRNGLDLDYVGPNTKHVLKVSLDITRYEYYTLGKYDLKKDRYIPDGNTPDGWEGLRFDYGNFYASKTFFDYKKNRRILWGWANESDTVEDDILKGWAGLQVIPRTVLLDSSKKQLVFWPVEEIESLRGNYVRMNNHDIKMGQRIEVKGITPAQADVEVTFYVGSLEKAEIFDPSFTWKPLELCNIKGSNVRGGVGPFGLITLATPDLEEYTPVFFRVFNDTKTHKPKVLMCSDARPSSLKQDTGLLAKDRMYKPSFAGFVDVDMADGRISLRSLIDHSVVESFGALGKTVITSRVYPVKAVKENAHLYVFNNGTQTVTIESLNAWNMDRPLQMNDGAL

SEQ ID NO: 33158 - protein, 411 aa, Arabidopsis thaliana
  misc_feature (1)..(411): Ceres Seq. ID no. 13602275
MNGSAFRDPTTAWFSKDGHWRTVVGSKRKRRGIAYIYRSRDFKHWVKAKHPVHSKQSTGMWECPDFFPVSLTDFRNGLDLDYVGPNTKHVLKVSLDITRYEYYTLGKYDLKKDRYIPDGNTPDGWEGLRFDYGNFYASKTFFDYKKNRRILWGWANESDTVEDDILKGWAGLQVIPRTVLLDSSKKQLVFWPVEEIESLRGNYVRMNNHDIKMGQRIEVKGITPAQADVEVTFYVGSLEKAEIFDPSFTWKPLELCNIKGSNVRGGVGPFGLITLATPDLEEYTPVFFRVFNDTKTHKPKVLMCSDARPSSLKQDTGLLAKDRMYKPSFAGFVDVDMADGRISLRSLIDHSVVESFGALGKTVITSRVYPVKAVKENAHLYVFNNGTQTVTIESLNAWNMDRPLQMNDGAL

SEQ ID NO: 33159 - protein, 352 aa, Arabidopsis thaliana
  misc_feature (1)..(352): Ceres Seq. ID no. 13602276
MWECPDFFPVSLTDFRNGLDLDYVGPNTKHVLKVSLDITRYEYYTLGKYDLKKDRYIPDGNTPDGWEGLRFDYGNFYASKTFFDYKKNRRILWGWANESDTVEDDILKGWAGLQVIPRTVLLDSSKKQLVFWPVEEIESLRGNYVRMNNHDIKMGQRIEVKGITPAQADVEVTFYVGSLEKAEIFDPSFTWKPLELCNIKGSNVRGGVGPFGLITLATPDLEEYTPVFFRVFNDTKTHKPKVLMCSDARPSSLKQDTGLLAKDRMYKPSFAGFVDVDMADGRISLRSLIDHSVVESFGALGKTVITSRVYPVKAVKENAHLYVFNNGTQTVTIESLNAWNMDRPLQMNDGAL

SEQ ID NO: 33160 - DNA, 1122 bp, Arabidopsis thaliana
  misc_feature (1)..(1122): Ceres Seq. ID no. 13602281
gcttactgattacagtttcagttccaaagatgagaactttgagctcccaattatactccaatggtggtctcacttggttccagaagaagaatcagagctctctgttcatcaagcatctcagagtctctaaaccatcgagggttcagctcatatctgctgttcaattccgtccgtgcatcgatattcataagggaaaagtgaaacagatagttggatccacacttcgtgacttgaaagaggatggttcagttctcgttacgaattttgaatcggataagtctgcggaagagtatgcaaagatgtacaaagaagatgggcttacgggtggtcatgtgataatgcttggagcagaccctttaagccaagctgcagctattggagcattacatgcttatcctggcggtttgcaagttggaggtggaatcaattctgagaattgcatgagttatattgaggagggagcaagccatgtcattgtcacttcgtatgtatttaacaatggaaagattgatcttgaaagactcaaagatattgtgagcattgttgggaaacaaagactgatattggaccttagctgcagaaagaaggatggaagatacgcaattgttactgatagatggcagaagttcagcgacgtcatccttgacgagaaatcattggagtttcttggaggattttcagatgagtttctggtgcatggcgtagacgttgaaggaaagaagctagggatcgatgaagagcttgtagcattgcttggcaactactctccgattccagtaacttatgcgggaggtgtgacggtaatggatgatgtagagaggatcaaggacgcaggaaagggacgtgtagatgtaacagtgggaagtgccttagacattttcgggggaaatcttccatacaaagacgtcgtcgcttggcatcacaagcagcactcactccattgatatcgccattttcacctttgctcatcttttttatttgcattaccccaaaccttaagcttcaatatttgcaacattaatcttcagctttaaacttttgtgcttctttctaaactcttcaagaatttgtcaattttgaatattttttcgattaatcaagtttatggtttggtttgactac

SEQ ID NO: 33161 - protein, 313 aa, Arabidopsis thaliana
  misc_feature (1)..(313): Ceres Seq. ID no. 13602282
LLITVSVPKMRTLSSQLYSNGGLTWFQKKNQSSLFIKHLRVSKPSRVQLISAVQFRPCIDIHKGKVKQIVGSTLRDLKEDGSVLVTNFESDKSAEEYAKMYKEDGLTGGHVIMLGADPLSQAAAIGALHAYPGGLQVGGGINSENCMSYIEEGASHVIVTSYVFNNGKIDLERLKDIVSIVGKQRLILDLSCRKKDGRYAIVTDRWQKFSDVILDEKSLEFLGGFSDEFLVHGVDVEGKKLGIDEELVALLGNYSPIPVTYAGGVTVMDDVERIKDAGKGRVDVTVGSALDIFGGNLPYKDVVAWHHKQHSLH

SEQ ID NO: 33162 - protein, 304 aa, Arabidopsis thaliana
  misc_feature (1)..(304): Ceres Seq. ID no. 13602283
MRTLSSQLYSNGGLTWFQKKNQSSLFIKHLRVSKPSRVQLISAVQFRPCIDIHKGKVKQIVGSTLRDLKEDGSVLVTNFESDKSAEEYAKMYKEDGLTGGHVIMLGADPLSQAAAIGALHAYPGGLQVGGGINSENCMSYIEEGASHVIVTSYVFNNGKIDLERLKDIVSIVGKQRLILDLSCRKKDGRYAIVTDRWQKFSDVILDEKSLEFLGGFSDEFLVHGVDVEGKKLGIDEELVALLGNYSPIPVTYAGGVTVMDDVERIKDAGKGRVDVTVGSALDIFGGNLPYKDVVAWHHKQHSLH

SEQ ID NO: 33163 - protein, 214 aa, Arabidopsis thaliana
  misc_feature (1)..(214): Ceres Seq. ID no. 13602284
MYKEDGLTGGHVIMLGADPLSQAAAIGALHAYPGGLQVGGGINSENCMSYIEEGASHVIVTSYVFNNGKIDLERLKDIVSIVGKQRLILDLSCRKKDGRYAIVTDRWQKFSDVILDEKSLEFLGGFSDEFLVHGVDVEGKKLGIDEELVALLGNYSPIPVTYAGGVTVMDDVERIKDAGKGRVDVTVGSALDIFGGNLPYKDVVAWHHKQHSLH

SEQ ID NO: 33164 - DNA, 1359 bp, Arabidopsis thaliana
  misc_feature (1)..(1359): Ceres Seq. ID no. 13602285
aaacctctctcttctctcacttcccagctacttctctctctcgcgctctctctttcttttttggcaatggctactggatcaacaaccgattccgccaggtctccttcctcaggtgttctccaaaagctgttattactattctctgtctgtatagctacttcaacttataaagcaatccagcctcctccatcaaagctatgtggctctcctgatggtccatccatcacaggaccaaggattaagctaagagacggaaggcagttagcttacaaagagcatggagttcctagagatgaagctactcataaaatcatcgttgtccatggatctgatagttgcagacatgataatgctttcgcagctctactatcaccggatattaaggaaggactaggtgtgtatatggtttcatttgatagacctggttatgcagagagtgatcctgacccaaaccgtactcctaaaagcttggctttggacattgaagagcttgctgatcagttgagtctaggatcgaagttctatgtcatcggttactcgatgggaggacaagctacttgggcatgccttaaatacattcctcacaggttggctggagtaacgcttgttgctccagtggtgaactattggtggaagaactttccatcagagatctcaaccgaagcttttaaccaacaagggagaaatgaccaatgggcggttcgtgttgcacactatgctccttggcttactcattggtggaactcccagagctggttccctggatcaagtgttgtggctcgcaatctcggtatgttgtccaaagcagacaaagagatcatgtttaagctcggtgctgcaaggagccaacatgaggcacaaataaggcaacaaggaacacacgagacattgcaccgtgacatgattgttggatttggaacttgggagttcgatccaatggagctcgagaatctgttcccgaacaatgaaggatcagtgcacttgtggcagggagatgatgatgtgcttgtccctgtgactctgcaacgttacattgcgaagaagctgccatggatccattaccatgagattcctggagcagggcatttgttcccgtttgctccaggtatggttaataacattgttaaaacgctcttaaccaatgatggagtgaagaagtaaacgatgtcttctctctcaaaaagttggctagttttggttttgtaacatgcattgctatgatattttgaaccgggatcagagagattcatgagaatctcaagtttctcttggttgctgatatatattgtgggtgattagtaaagagttctggtacctatgtaaaacattctcagcattcatctcaaaaagctgtttctg

SEQ ID NO: 33165 - protein, 386 aa, Arabidopsis thaliana
  misc_feature (1)..(386): Ceres Seq. ID no. 13602286
KPLSSLTSQLLLSLALSLSFLAMATGSTTDSARSPSSGVLQKLLLLFSVCIATSTYKAIQPPPSKLCGSPDGPSITGPRIKLRDGRQLAYKEHGVPRDEATHKIIVVHGSDSCRHDNAFAALLSPDIKEGLGVYMVSFDRPGYAESDPDPNRTPKSLALDIEELADQLSLGSKFYVIGYSMGGQATWACLKYIPHRLAGVTLVAPVVNYWWKNFPSEISTEAFNQQGRNDQWAVRVAHYAPWLTHWWNSQSWFPGSSVVARNLGMLSKADKEIMFKLGAARSQHEAQIRQQGTHETLHRDMIVGFGTWEFDPMELENLFPNNEGSVHLWQGDDDVLVPVTLQRYIAKKLPWIHYHEIPGAGHLFPFAPGMVNNIVKTLLTNDGVKK

SEQ ID NO: 33166 - protein, 364 aa, Arabidopsis thaliana
  misc_feature (1)..(364): Ceres Seq. ID no. 13602287
MATGSTTDSARSPSSGVLQKLLLLFSVCIATSTYKAIQPPPSKLCGSPDGPSITGPRIKLRDGRQLAYKEHGVPRDEATHKIIVVHGSDSCRHDNAFAALLSPDIKEGLGVYMVSFDRPGYAESDPDPNRTPKSLALDIEELADQLSLGSKFYVIGYSMGGQATWACLKYIPHRLAGVTLVAPVVNYWWKNFPSEISTEAFNQQGRNDQWAVRVAHYAPWLTHWWNSQSWFPGSSVVARNLGMLSKADKEIMFKLGAARSQHEAQIRQQGTHETLHRDMIVGFGTWEFDPMELENLFPNNEGSVHLWQGDDDVLVPVTLQRYIAKKLPWIHYHEIPGAGHLFPFAPGMVNNIVKTLLTNDGVKK

SEQ ID NO: 33167 - protein, 252 aa, Arabidopsis thaliana
  misc_feature (1)..(252): Ceres Seq. ID no. 13602288
MVSFDRPGYAESDPDPNRTPKSLALDIEELADQLSLGSKFYVIGYSMGGQATWACLKYIPHRLAGVTLVAPVVNYWWKNFPSEISTEAFNQQGRNDQWAVRVAHYAPWLTHWWNSQSWFPGSSVVARNLGMLSKADKEIMFKLGAARSQHEAQIRQQGTHETLHRDMIVGFGTWEFDPMELENLFPNNEGSVHLWQGDDDVLVPVTLQRYIAKKLPWIHYHEIPGAGHLFPFAPGMVNNIVKTLLTNDGVKK

SEQ ID NO: 33168 - DNA, 1328 bp, Arabidopsis thaliana
  misc_feature (1)..(1328): Ceres Seq. ID no. 13602292
aaaggattccgaaaaaagcttagacctttttgatctgatacgtatctataaatctggaaaggagctgagagtttcaaggggttttaatttcgctgagaaaacgtttaattatctttgtcgagatggattgtggtatggagaattgtaatggtgggatctcaaacggtgacgttttgggtaagcatgagaagctcattatcgatacagacccaggaattgatgatagcatggcgatattgatggcgtttcaaacaccggagctggagatattaggattaactactgtgtttggtaatgtttctacacaagatgctactcgcaacgctttactcttgtgtgagattgctggcttccctgatgttcccgttgcagaaggaagttccgaacctttaaagggtggaattccgcgtgttgctgattttgtgcatggtaaaaacggactaggagatgtctctcttcctcctccgagtagaaagaaatctgagaaaagtgcagctgagtttctagatgagaaggtcgaagaatatccgggtgaagtcaccattctcgccctcggacctctaaccaacctggcattagccatcaaacgcgatagttcatttgcgagcaaggtgaagaaaattgttattcttggtggagctttcttttctttgggaaatgtcaatcctgcagctgaggctaatatatatggtgacccggaagcagctgatgttgttttcacatctggagcggatatcactgttgtcggtataaacatcacaacccaacttaaactatcagatgatgacctcttggagcttggtaactgcaaggggaaacactctaaattgataagcgatatgtgcaaattttatagagattggcacgtcaaatctgatggtgtttacggagtgtacctccatgacccagtcagctttgtggctgtagtacggcctgatttattcacatataagaaaggcgttgttcgggtggagactcaagggatatgtgttggccacacgctcatggatcaaggcctcaagagatggaacggaagcaatccgtgggtgggatattcaccgatatcagttgcttggacggttgacgtagaaggagttttggaatatgtcaaagcaaagctgatgaagccataaaagatgagtttcagagcacgttagagtgtgaatattcatttaaaatggcatcatcacattcatctcttctggttctaaccggaatcttatattcatctctgtatttgatctgtataaatgctatattcgattaaaagaaaagactaatgaatgaaaactatcttcgttttctcttatcgatctttgtttctttcc

SEQ ID NO: 33169 - protein, 336 aa, Arabidopsis thaliana
  misc_feature (1)..(336): Ceres Seq. ID no. 13602293
MDCGMENCNGGISNGDVLGKHEKLIIDTDPGIDDSMAILMAFQTPELEILGLTTVFGNVSTQDATRNALLLCEIAGFPDVPVAEGSSEPLKGGIPRVADFVHGKNGLGDVSLPPPSRKKSEKSAAEFLDEKVEEYPGEVTILALGPLTNLALAIKRDSSFASKVKKIVILGGAFFSLGNVNPAAEANIYGDPEAADVVFTSGADITVVGINITTQLKLSDDDLLELGNCKGKHSKLISDMCKFYRDWHVKSDGVYGVYLHDPVSFVAVVRPDLFTYKKGVVRVETQGICVGHTLMDQGLKRWNGSNPWVGYSPISVAWTVDVEGVLEYVKAKLMKP

SEQ ID NO: 33170 - protein, 332 aa, Arabidopsis thaliana
  misc_feature (1)..(332): Ceres Seq. ID no. 13602294
MENCNGGISNGDVLGKHEKLIIDTDPGIDDSMAILMAFQTPELEILGLTTVFGNVSTQDATRNALLLCEIAGFPDVPVAEGSSEPLKGGIPRVADFVHGKNGLGDVSLPPPSRKKSEKSAAEFLDEKVEEYPGEVTILALGPLTNLALAIKRDSSFASKVKKIVILGGAFFSLGNVNPAAEANIYGDPEAADVVFTSGADITVVGINITTQLKLSDDDLLELGNCKGKHSKLISDMCKFYRDWHVKSDGVYGVYLHDPVSFVAVVRPDLFTYKKGVVRVETQGICVGHTLMDQGLKRWNGSNPWVGYSPISVAWTVDVEGVLEYVKAKLMKP

SEQ ID NO: 33171 - protein, 301 aa, Arabidopsis thaliana
  misc_feature (1)..(301): Ceres Seq. ID no. 13602295
MAILMAFQTPELEILGLTTVFGNVSTQDATRNALLLCEIAGFPDVPVAEGSSEPLKGGIPRVADFVHGKNGLGDVSLPPPSRKKSEKSAAEFLDEKVEEYPGEVTILALGPLTNLALAIKRDSSFASKVKKIVILGGAFFSLGNVNPAAEANIYGDPEAADVVFTSGADITVVGINITTQLKLSDDDLLELGNCKGKHSKLISDMCKFYRDWHVKSDGVYGVYLHDPVSFVAVVRPDLFTYKKGVVRVETQGICVGHTLMDQGLKRWNGSNPWVGYSPISVAWTVDVEGVLEYVKAKLMKP

SEQ ID NO: 33172 - DNA, 1544 bp, Arabidopsis thaliana
  misc_feature (1)..(1544): Ceres Seq. ID no. 13602304
aatgaaagaaactgttcaacaacttctgatttctaaaatcttttaaaaatctctccgccacttctagttggacttgatttctcaccatagtctgtcccgttgttaccgaccatctattatatagggaaagtctcttagctacagagacacaataaccatttggagaggtcatgaactctaagaatcgcataaacaatgtcggggaaggtgttgatatcgaaatccctgacactgctcatcagattagcagcgattcatggtttcaggcagcgttcgttctgacaacaagtataaacagcgcatacgtgttgggatattcaggaacagtcatggttcctttaggatggattggtggtgtggttggtcttattcttgctactgcaatctcactctatgcaaacactctcgtagccaagcttcatgagtttggtggcaaaagacacattcgctatagagaccttgcgggattcatttacggtagaaaggcttattgtcttacatgggtgttgcaatatgtcaatcttttcatgattaattgtggtttcatcatactagctggttccgccttaaaggctgtttatgtgctttttagggatgatcatgccatgaagttacctcattttatagctattgcgggtctgatttgtgcggtttttgctattggaattcctcatttgtcggctcttgggatatggcttgcggtttcgactatcctcagcctcatctatatcgttgtggcaatcgtgctatcggttaaagatggagttaaagcaccttcaagagattacgagatacaaggatcaccactaagcaaactttttaccatcactggagcagccgctacactagttttcgtattcaacacagggatgcttccagaaattcaggcaacagtaaagcaaccagtagtaaaaaacatgatgaaggctctatactttcaattcacggtgggtgttttaccgatgtttgcggttgtattcatcgggtattgggcttacggatcctcgacctcgccctatctactaaacaacgttaatggtccactttgggttaaagcccttgctaacatctccgctatccttcaatccgttatctcgttgcacatttttgcaagtccaacatatgagtacatggacaccaagtttgggatcaaaggaaacccattggcattaaagaacttgttgtttaggatcatggcaagaggcgggtacatagcagttagtacgcttctctcagcactcttgccgttccttggggacttcatgagcctcactggtgcagtgagcacattcccccttacattcattctagccaaccacatgtactataaggctaagaacaataagctcaatactttgcaaaagctatgccattggctcaacgttgtcttcttcagtttgatgtctgttgctgccgccattgcagctcttaggctcatcgcccttgactccaaaaacttccacgtttttgcagatttgtaattcataatatatactcatcgtatttattcttagttggatttcttatcaataaaattaattttc

SEQ ID NO: 33173 - protein, 436 aa, Arabidopsis thaliana
  misc_feature (1)..(436): Ceres Seq. ID no. 13602305
MNSKNRINNVGEGVDIEIPDTAHQISSDSWFQAAFVLTTSINSAYVLGYSGTVMVPLGWIGGVVGLILATAISLYANTLVAKLHEFGGKRHIRYRDLAGFIYGRKAYCLTWVLQYVNLFMINCGFIILAGSALKAVYVLFRDDHAMKLPHFIAIAGLICAVFAIGIPHLSALGIWLAVSTILSLIYIVVAIVLSVKDGVKAPSRDYEIQGSPLSKLFTITGAAATLVFVFNTGMLPEIQATVKQPVVKNMMKALYFQFTVGVLPMFAVVFIGYWAYGSSTSPYLLNNVNGPLWVKALANISAILQSVISLHIFASPTYEYMDTKFGIKGNPLALKNLLFRIMARGGYIAVSTLLSALLPFLGDFMSLTGAVSTFPLTFILANHMYYKAKNNKLNTLQKLCHWLNVVFFSLMSVAAAIAALRLIALDSKNFHVFADL

SEQ ID NO: 33174 - protein, 383 aa, Arabidopsis thaliana
  misc_feature (1)..(383): Ceres Seq. ID no. 13602306
MVPLGWIGGVVGLILATAISLYANTLVAKLHEFGGKRHIRYRDLAGFIYGRKAYCLTWVLQYVNLFMINCGFIILAGSALKAVYVLFRDDHAMKLPHFIAIAGLICAVFAIGIPHLSALGIWLAVSTILSLIYIVVAIVLSVKDGVKAPSRDYEIQGSPLSKLFTITGAAATLVFVFNTGMLPEIQATVKQPVVKNMMKALYFQFTVGVLPMFAVVFIGYWAYGSSTSPYLLNNVNGPLWVKALANISAILQSVISLHIFASPTYEYMDTKFGIKGNPLALKNLLFRIMARGGYIAVSTLLSALLPFLGDFMSLTGAVSTFPLTFILANHMYYKAKNNKLNTLQKLCHWLNVVFFSLMSVAAAIAALRLIALDSKNFHVFADL

SEQ ID NO: 33175 - protein, 317 aa, Arabidopsis thaliana
  misc_feature (1)..(317): Ceres Seq. ID no. 13602307
MINCGFIILAGSALKAVYVLFRDDHAMKLPHFIAIAGLICAVFAIGIPHLSALGIWLAVSTILSLIYIVVAIVLSVKDGVKAPSRDYEIQGSPLSKLFTITGAAATLVFVFNTGMLPEIQATVKQPVVKNMMKALYFQFTVGVLPMFAVVFIGYWAYGSSTSPYLLNNVNGPLWVKALANISAILQSVISLHIFASPTYEYMDTKFGIKGNPLALKNLLFRIMARGGYIAVSTLLSALLPFLGDFMSLTGAVSTFPLTFILANHMYYKAKNNKLNTLQKLCHWLNVVFFSLMSVAAAIAALRLIALDSKNFHVFADL

SEQ ID NO: 33176 - DNA, 1340 bp, Arabidopsis thaliana
  misc_feature (1)..(1340): Ceres Seq. ID no. 13602339
gttcaaacaattcttcgtcctattaaatacaaaaaataaaaatccttaaaaatatatccttatcttcaaccaagaatgggagaggtccaagaaggtcccaaagttgaacaagagaagaagccggctgccaccgtagtcccagttgagactactgacggcaagccaaagagcggcggaggagattccgcggcagcagcagcaccaccggtcgccgcggttgtctctgcctttgtttacaaagtggatatgcactgtgaaggctgcgctaagaagataaagcgaatggttaagcactttgatggagtgaaagatgtgacggcagatactggtggaaataagcttttggtggtcggaaagattgatccagtgaaactccaggagaagttggaggagaaaaccaagagaaaggtggttctcgcgaatccaccgccaaaggtagagggacctgttgctgccgccgttggagagaagaaagccgatggtggagataaggaggcggctcctcctgctcctgctccggcagctccaaaagagagcgtggtgcctttaaagatcagactacattgcgaaggatgtattcagaaaatcaagaaaataatattgaaaatcaaaggagtcgaaacagtggctattgacggagctaaagacgtggtgacggttaaaggaacgatagacgttaaagaacttgtgcctctactcactaagaagctcaaaagaaccgtcgagcctcttgttcccgccaaaaaagatgacggagccgccgagaataagaagacggaagctgccgctcctgacgcaaagaaagaggctccgtccgccggagttaacgaagcaaagaaggaaggaagtgacggtggagagaagaaaaaagaggttggagacggcggagagaagaagaaagaaggtggtgacggcggagagaaaaagaaagaagccggagacggaggagagaagaagaaagatggcggaggtgtgccggccccggtggcgatggtgaataagatggattattatgggtactcagcttatccaacggctcctatgcattggcaagaaggacacgtgtacggtcagagttattcgatgacaggtcagaattatccagtgggaggtcagagttatccaggttcaggatacaactacgcaagtgagagttacgtgccgtacgcgcagccaaacgtgaacgctcctggaatgttcagcgacgagaatcccaatggttgctctgttatgtaataatggggttaaactgtaaatataagaaactataagggtttaaaacataattgtgggaacacaaaacttatgttaaaattttgaaagtctactttgagccagcg

SEQ ID NO: 33177 - protein, 386 aa, Arabidopsis thaliana
  misc_feature (1)..(386): Ceres Seq. ID no. 13602340
MGEVQEGPKVEQEKKPAATVVPVETTDGKPKSGGGDSAAAAAPPVAAVVSAFVYKVDMHCEGCAKKIKRMVKHFDGVKDVTADTGGNKLLVVGKIDPVKLQEKLEEKTKRKVVLANPPPKVEGPVAAAVGEKKADGGDKEAAPPAPAPAAPKESVVPLKIRLHCEGCIQKIKKIILKIKGVETVAIDGAKDVVTVKGTIDVKELVPLLTKKLKRTVEPLVPAKKDDGAAENKKTEAAAPDAKKEAPSAGVNEAKKEGSDGGEKKKEVGDGGEKKKEGGDGGEKKKEAGDGGEKKKDGGGVPAPVAMVNKMDYYGYSAYPTAPMHWQEGHVYGQSYSMTGQNYPVGGQSYPGSGYNYASESYVPYAQPNVNAPGMFSDENPNGCSVM

SEQ ID NO: 33178 - protein, 329 aa, Arabidopsis thaliana
  misc_feature (1)..(329): Ceres Seq. ID no. 13602341
MHCEGCAKKIKRMVKHFDGVKDVTADTGGNKLLVVGKIDPVKLQEKLEEKTKRKVVLANPPPKVEGPVAAAVGEKKADGGDKEAAPPAPAPAAPKESVVPLKIRLHCEGCIQKIKKIILKIKGVETVAIDGAKDVVTVKGTIDVKELVPLLTKKLKRTVEPLVPAKKDDGAAENKKTEAAAPDAKKEAPSAGVNEAKKEGSDGGEKKKEVGDGGEKKKEGGDGGEKKKEAGDGGEKKKDGGGVPAPVAMVNKMDYYGYSAYPTAPMHWQEGHVYGQSYSMTGQNYPVGGQSYPGSGYNYASESYVPYAQPNVNAPGMFSDENPNGCSVM

SEQ ID NO: 33179 - protein, 317 aa, Arabidopsis thaliana
  misc_feature (1)..(317): Ceres Seq. ID no. 13602342
MVKHFDGVKDVTADTGGNKLLVVGKIDPVKLQEKLEEKTKRKVVLANPPPKVEGPVAAAVGEKKADGGDKEAAPPAPAPAAPKESVVPLKIRLHCEGCIQKIKKIILKIKGVETVAIDGAKDVVTVKGTIDVKELVPLLTKKLKRTVEPLVPAKKDDGAAENKKTEAAAPDAKKEAPSAGVNEAKKEGSDGGEKKKEVGDGGEKKKEGGDGGEKKKEAGDGGEKKKDGGGVPAPVAMVNKMDYYGYSAYPTAPMHWQEGHVYGQSYSMTGQNYPVGGQSYPGSGYNYASESYVPYAQPNVNAPGMFSDENPNGCSVM

SEQ ID NO: 33180 - DNA, 4432 bp, Arabidopsis thaliana
  misc_feature (1)..(4432): Ceres Seq. ID no. 13602347
atgagagttagggttgatgtttgttggacacaacacatcttcttgttctttgtttttggcttgagttttatgtcatttgcactatctctggatggagatgattacagcaaaacagggaacccaaaagctcttgtttcggttacaaaccttatctatactcgacttcagaatctaaagactgttttaaaggctgacgttgatcgagatttaggttattgcatcaagaatttgaagggcgattggaatgaagcatttaattttgataaaaatctggacttcttaagcaattgtgtcaagaaaaatgatggtgacctcacacttagactatgttcagctgcggagataaagttctactttagtagttttgttagaagagatgaagcaacaacggttcatgtaaagcctaacatcaactgcaatttagctaaatgggtttccggatgtgagcctggatggagttgcaatgcagatgatgaaaaaagatttgatctcaacaatggaaaaattcttccatctagaactcgtaaatgtcaaccttgttgtgagggtttcttttgtccacaaggtcttgcttgcatgataccgtgtccgttaggcgcatattgcccgcttgccaagcttaataaaacaacaggattttgtgagccatataactaccaaattcctccgggaaagttgaatcatacatgtggttctgcagatagttgggttgatgctgagagtagtggtgatatgttttgttcaccaggttcatattgcccaacaacgattcgaaaagtcacttgtagtagtggacattactgcagacaaggttctacgtcacagaaaccatgttttaagctcgcaacatgcaatccgaataccgcaaaccaaaatattcatgcctatggagcgatcttaattgcatcactaagtcttctcatgatcatggtttataactgttctgatcaagttctcgccactcgagaaaaaagacaagcaaagtcgagagaagctgcagcgagacatgcaaaagaaacaacacaagctcgagaaaggtggaaaaccgcaaaaggtgttgccaagaaccaaaagatgggattgtctgcacaactatctcaaacattttctcgcatgaaatctgctagaaaggatgccacaccagttaaagcatcgggaaagtcaaaagacaagaaaaaagaaccgagtaatttaaccaagatgatgaaatcaatggaggagaacccgagtaacaacgaaggattcaatgtaggaaccggtagtaaacctgggaagaagccacaagctccaaagggtaaacaactacatacccaaagccagatttttaagtatgcatatggtcagattgagaaggagaaagctatggaacaaaacaacaagaacttgacattctcgggagttatttcaatggctactgacactgagatgaggactagacctgttatagaagtcgcgtttaaggatctaactcttacattgaagggtaaacataagcatatattgagatctgtcaccggaaagatcatgccaggtcgtgtttctgcggtcatgggtccatcaggagctggaaaaactacatttctttctgccttggcaggaaaagcaactggatgtacgaggacgggtctaatccttataaatggtagaaatgactctataaactcgtataagaagatcactggatttgtgccacaagatgatgttgtgcatggcaatcttaccgtcgaagagaaccttcgatttagcgcaagatgcagattaagtgcttatatgtcaaaagcagacaaagttttgatcattgaaagagtgattgaaagcttaggattacaacatgtaagagactcgttggttggtacgatagaaaaaagaggaatctctggaggacaaagaaaacgtgtgaacgttggtgttgaaatggtcatggaaccttctctattgatattagatgaacccactacaggtttagatagtgcatcttcacaattacttcttagagcacttcgacgtgaagcacttgaaggtgttaacatttgtatggtcgtccatcaacccagttatacaatgtacaaaatgttcgatgacatgataatactagcaaaaggtggtcttaccgtgtaccatggatcagtcaaaaaaatagaagaatattttgctgatatcggaatcacggttcccgatcgtgtcaatcctcctgatcattatatagatattcttgaaggcattgtgaaaccagatggtgatataactatagaacaacttcctgtgagatggatgctgcacaatggttaccctgtgcctcacgatatgttgaaattttgtgatggacttccttcctcgtcaactggatcagctcaagaggattccactcataattcttttagtaatgatctatggcaagatgtgaaaactaatgtggagattacaaaagatcagttacaacacaattactcgaattctcatgacaattctaatcgagtaactcctaccgtaggtcgacaatatagatattttgttggaagggttggaaaacaacggcttagagaagcaagactacaagcgttagatttcctaatattattagttgcgggagcttgtttaggaactcttgcgaaggtgaacgacgagacaatcgatacacttggctacacatacaccataatagctgtctctcttttgtgtaagatctcggcattgagatcattctctgtagataaattacaatattggagagaaagtgccgctggaattagcagtttggcacattttatggctaaagacacaatggaccatttaaacacaattatgaaacctttagtgtacttgtccatgttctacttcttcaacaacccgagatctagtttcgaagacaactacattgtactagtatgcttggtctactgtgtaacaggcatggcttacatttttgccatattgtacagtcctagcgccgcacaattgttgtcggtgttagtccccgttgttatgactcttatcgctaatcaagataaagaaagcatggtccttaagtatctcggaagcttttgctaccccaaatggactctcgaagcctttgtcctttccaatgctcaaaggtactctggagtgtgggtggtgactagatgcagttcattgtctcaaaacggatatgatcttagtgattggatattgtgtctcattgttctcgttctcatgggactaatatgccgattcatagcttatttctgcatgggaagcggcgtaactaaaaaacacgacacgatgatgaattcggcgtttcgaaacgttcacatcactgcgtctcgtttgataaaccctaagcccttttcttcttcgattctccattttcttcctctctgttccggcgacgcttctcctcgccgttccaatcctctccggcatagaaactcggtgtctccttcatcttcctttcccttctgttcgacttcttccttttcttctttctacattcctatggcgggaggagatggtcaggtgtctcattcgcttgagaagcagttcgagagtttccgtgttcaattggaagaatctgcagctttgagagagcagattcgtgctgtggttatggagattgagtctgctactaggcttattcaagctaatcttcttctcgttcatcaatcgcgtcctattcctgaggttatcgagaaagctaaggaaaaaatcgttgatttgaagcagtattatggtcggcttgctgaaattcttgaggagtgtcctggacaatactataggtaccatggagactggagaagtgaaacacaggcagtggtctcccagcttgcttttatgcactggctagaaactggaactcttctcgtgcataccgaagctgaagaaaaacttgggttgaacagtttggagtttggattggagacagaagattatctcactggaatttgtttcatgtcaaacgatttgcctaggtacgtggttaatcgagtgacagcaggagactatgactgcccaagaaaggtgatgaatttcctgacagatcttcatgcagcctttcgcatgctcaatctcaggaacgatttcctgcgcaagaaattcgacagtatgaagtacgacctaagaagagtggaagaagtttactatgatgtcaagatccgaggtttgatttccggcggagatcctcctggcgtccaagcagtccaaggccaatcctaaatgtcctcggctctttttaagtttttatgtataactttgtttagctagcatgaaaacgtcaaggagtgttcttctctaaaccaaaaacggcaaggaaaatagagagactgtagtttttaggtgtagtttgcaattactgaaaacggcaagtattccttttgtgggccttgaaagcccacattttagtcacaactttactgttatccgaagtcagcagcttaatagtataacagtagatgttcat

SEQ ID NO: 33181 - protein, 1395 aa, Arabidopsis thaliana
  misc_feature (1)..(1395): Ceres Seq. ID no. 13602348
MRVRVDVCWTQHIFLFFVFGLSFMSFALSLDGDDYSKTGNPKALVSVTNLIYTRLQNLKTVLKADVDRDLGYCIKNLKGDWNEAFNFDKNLDFLSNCVKKNDGDLTLRLCSAAEIKFYFSSFVRRDEATTVHVKPNINCNLAKWVSGCEPGWSCNADDEKRFDLNNGKILPSRTRKCQPCCEGFFCPQGLACMIPCPLGAYCPLAKLNKTTGFCEPYNYQIPPGKLNHTCGSADSWVDAESSGDMFCSPGSYCPTTIRKVTCSSGHYCRQGSTSQKPCFKLATCNPNTANQNIHAYGAILIASLSLLMIMVYNCSDQVLATREKRQAKSREAAARHAKETTQARERWKTAKGVAKNQKMGLSAQLSQTFSRMKSARKDATPVKASGKSKDKKKEPSNLTKMMKSMEENPSNNEGFNVGTGSKPGKKPQAPKGKQLHTQSQIFKYAYGQIEKEKAMEQNNKNLTFSGVISMATDTEMRTRPVIEVAFKDLTLTLKGKHKHILRSVTGKIMPGRVSAVMGPSGAGKTTFLSALAGKATGCTRTGLILINGRNDSINSYKKITGFVPQDDVVHGNLTVEENLRFSARCRLSAYMSKADKVLIIERVIESLGLQHVRDSLVGTIEKRGISGGQRKRVNVGVEMVMEPSLLILDEPTTGLDSASSQLLLRALRREALEGVNICMVVHQPSYTMYKMFDDMIILAKGGLTVYHGSVKKIEEYFADIGITVPDRVNPPDHYIDILEGIVKPDGDITIEQLPVRWMLHNGYPVPHDMLKFCDGLPSSSTGSAQEDSTHNSFSNDLWQDVKTNVEITKDQLQHNYSNSHDNSNRVTPTVGRQYRYFVGRVGKQRLREARLQALDFLILLVAGACLGTLAKVNDETIDTLGYTYTIIAVSLLCKISALRSFSVDKLQYWRESAAGISSLAHFMAKDTMDHLNTIMKPLVYLSMFYFFNNPRSSFEDNYIVLVCLVYCVTGMAYIFAILYSPSAAQLLSVLVPVVMTLIANQDKESMVLKYLGSFCYPKWTLEAFVLSNAQRYSGVWVVTRCSSLSQNGYDLSDWILCLIVLVLMGLICRFIAYFCMGSGVTKKHDTMMNSAFRNVHITASRLINPKPFSSSILHFLPLCSGDASPRRSNPLRHRNSVSPSSSFPFCSTSSFSSFYIPMAGGDGQVSHSLEKQFESFRVQLEESAALREQIRAVVMEIESATRLIQANLLLVHQSRPIPEVIEKAKEKIVDLKQYYGRLAEILEECPGQYYRYHGDWRSETQAVVSQLAFMHWLETGTLLVHTEAEEKLGLNSLEFGLETEDYLTGICFMSNDLPRYVVNRVTAGDYDCPRKVMNFLTDLHAAFRMLNLRNDFLRKKFDSMKYDLRRVEEVYYDVKIRGLISGGDPPGVQAVQGQS

SEQ ID NO: 33182 - protein, 1372 aa, Arabidopsis thaliana
  misc_feature (1)..(1372): Ceres Seq. ID no. 13602349
MSFALSLDGDDYSKTGNPKALVSVTNLIYTRLQNLKTVLKADVDRDLGYCIKNLKGDWNEAFNFDKNLDFLSNCVKKNDGDLTLRLCSAAEIKFYFSSFVRRDEATTVHVKPNINCNLAKWVSGCEPGWSCNADDEKRFDLNNGKILPSRTRKCQPCCEGFFCPQGLACMIPCPLGAYCPLAKLNKTTGFCEPYNYQIPPGKLNHTCGSADSWVDAESSGDMFCSPGSYCPTTIRKVTCSSGHYCRQGSTSQKPCFKLATCNPNTANQNIHAYGAILIASLSLLMIMVYNCSDQVLATREKRQAKSREAAARHAKETTQARERWKTAKGVAKNQKMGLSAQLSQTFSRMKSARKDATPVKASGKSKDKKKEPSNLTKMMKSMEENPSNNEGFNVGTGSKPGKKPQAPKGKQLHTQSQIFKYAYGQIEKEKAMEQNNKNLTFSGVISMATDTEMRTRPVIEVAFKDLTLTLKGKHKHILRSVTGKIMPGRVSAVMGPSGAGKTTFLSALAGKATGCTRTGLILINGRNDSINSYKKITGFVPQDDVVHGNLTVEENLRFSARCRLSAYMSKADKVLIIERVIESLGLQHVRDSLVGTIEKRGISGGQRKRVNVGVEMVMEPSLLILDEPTTGLDSASSQLLLRALRREALEGVNICMVVHQPSYTMYKMFDDMIILAKGGLTVYHGSVKKIEEYFADIGITVPDRVNPPDHYIDILEGIVKPDGDITIEQLPVRWMLHNGYPVPHDMLKFCDGLPSSSTGSAQEDSTHNSFSNDLWQDVKTNVEITKDQLQHNYSNSHDNSNRVTPTVGRQYRYFVGRVGKQRLREARLQALDFLILLVAGACLGTLAKVNDETIDTLGYTYTIIAVSLLCKISALRSFSVDKLQYWRESAAGISSLAHFMAKDTMDHLNTIMKPLVYLSMFYFFNNPRSSFEDNYIVLVCLVYCVTGMAYIFAILYSPSAAQLLSVLVPVVMTLIANQDKESMVLKYLGSFCYPKWTLEAFVLSNAQRYSGVWVVTRCSSLSQNGYDLSDWILCLIVLVLMGLICRFIAYFCMGSGVTKKHDTMMNSAFRNVHITASRLINPKPFSSSILHFLPLCSGDASPRRSNPLRHRNSVSPSSSFPFCSTSSFSSFYIPMAGGDGQVSHSLEKQFESFRVQLEESAALREQIRAVVMEIESATRLIQANLLLVHQSRPIPEVIEKAKEKIVDLKQYYGRLAEILEECPGQYYRYHGDWRSETQAVVSQLAFMHWLETGTLLVHTEAEEKLGLNSLEFGLETEDYLTGICFMSNDLPRYVVNRVTAGDYDCPRKVMNFLTDLHAAFRMLNLRNDFLRKKFDSMKYDLRRVEEVYYDVKIRGLISGGDPPGVQAVQGQS

SEQ ID NO: 33183 - protein, 1203 aa, Arabidopsis thaliana
  misc_feature (1)..(1203): Ceres Seq. ID no. 13602350
MIPCPLGAYCPLAKLNKTTGFCEPYNYQIPPGKLNHTCGSADSWVDAESSGDMFCSPGSYCPTTIRKVTCSSGHYCRQGSTSQKPCFKLATCNPNTANQNIHAYGAILIASLSLLMIMVYNCSDQVLATREKRQAKSREAAARHAKETTQARERWKTAKGVAKNQKMGLSAQLSQTFSRMKSARKDATPVKASGKSKDKKKEPSNLTKMMKSMEENPSNNEGFNVGTGSKPGKKPQAPKGKQLHTQSQIFKYAYGQIEKEKAMEQNNKNLTFSGVISMATDTEMRTRPVIEVAFKDLTLTLKGKHKHILRSVTGKIMPGRVSAVMGPSGAGKTTFLSALAGKATGCTRTGLILINGRNDSINSYKKITGFVPQDDVVHGNLTVEENLRFSARCRLSAYMSKADKVLIIERVIESLGLQHVRDSLVGTIEKRGISGGQRKRVNVGVEMVMEPSLLILDEPTTGLDSASSQLLLRALRREALEGVNICMVVHQPSYTMYKMFDDMIILAKGGLTVYHGSVKKIEEYFADIGITVPDRVNPPDHYIDILEGIVKPDGDITIEQLPVRWMLHNGYPVPHDMLKFCDGLPSSSTGSAQEDSTHNSFSNDLWQDVKTNVEITKDQLQHNYSNSHDNSNRVTPTVGRQYRYFVGRVGKQRLREARLQALDFLILLVAGACLGTLAKVNDETIDTLGYTYTIIAVSLLCKISALRSFSVDKLQYWRESAAGISSLAHFMAKDTMDHLNTIMKPLVYLSMFYFFNNPRSSFEDNYIVLVCLVYCVTGMAYIFAILYSPSAAQLLSVLVPVVMTLIANQDKESMVLKYLGSFCYPKWTLEAFVLSNAQRYSGVWVVTRCSSLSQNGYDLSDWILCLIVLVLMGLICRFIAYFCMGSGVTKKHDTMMNSAFRNVHITASRLINPKPFSSSILHFLPLCSGDASPRRSNPLRHRNSVSPSSSFPFCSTSSFSSFYIPMAGGDGQVSHSLEKQFESFRVQLEESAALREQIRAVVMEIESATRLIQANLLLVHQSRPIPEVIEKAKEKIVDLKQYYGRLAEILEECPGQYYRYHGDWRSETQAVVSQLAFMHWLETGTLLVHTEAEEKLGLNSLEFGLETEDYLTGICFMSNDLPRYVVNRVTAGDYDCPRKVMNFLTDLHAAFRMLNLRNDFLRKKFDSMKYDLRRVEEVYYDVKIRGLISGGDPPGVQAVQGQS

SEQ ID NO: 33184 - DNA, 1236 bp, Arabidopsis thaliana
  misc_feature (1)..(1236): Ceres Seq. ID no. 13602358
gcgacagagattttctccgaccaatccatgtcggaaaacatggtgaatctaccggattctttgtacgaggactacagtaaactcaagttgacttcaccctccaacgcttcttcatcctcctcagctcctccgcccaggctcagcgtcgtagctcatccaacggtagagatgattatccagtgggtctgtgatattcataaaccgaagtcatacatgtctgattttgcgctgcataatctcgcctatcataggaacgactttgagttcttgccgagtctgttatgggaatctaaaaatactgtgtacatcatgttgcaggaggtttttgaagcctacagacacctcgcaggacacatctcacttcgattgttccctcatccgttgaatccacttcgagtgtacaatgtttttcttttgttccagagcatggcttgtcacccagacacaagccgtcagtttcttagggctaagatgccaaattatttctatcctctgatggacactggtctcattgataaaagtgacgaatgcatgaggcttgctgcgttgggtgtcattgctcatatgttgaaggcgtctgaagatggagctgttaatcgttacctaatggaaagtggtgttgttggtttctgcgttaaacccattgagtttggctctacagaaacaaaaaaagttgctttatacatactcgacaagattatgtcgacggatcaggggctttattactgctgcgtcttggctgatcggttttacgttatcgatgagctccttaagaaggtgctcttctatctttctaacatggtcagacctccttcatccttgttcagccttgttactggttgctacgtcaagctctcccagaactccagggctcgtaacggaataaggcgatacacgcctttcttgctgtttgacggcaccttttccagattatatgctgaggatccagtggctgctaacaatcgaattcagctgcttcagaatctggacaactaaagcaatgaagtactcgagacactgttttcaatgaggcaatgaaaacagaacagcccccacngagtacgggtttagtacgcctacgcgtaaacgctaagtaataatttactaaagacataaaaactctangaaaagtcttatgttgttgttnggtttaatatctttgggatgactctcgttactctttcaacattgttttctctcttttggaatacatttcaatgcactttgccattttcc

SEQ ID NO: 33185 - protein, 331 aa, Arabidopsis thaliana
  misc_feature (1)..(331): Ceres Seq. ID no. 13602359
ATEIFSDQSMSENMVNLPDSLYEDYSKLKLTSPSNASSSSSAPPPRLSVVAHPTVEMIIQWVCDIHKPKSYMSDFALHNLAYHRNDFEFLPSLLWESKNTVYIMLQEVFEAYRHLAGHISLRLFPHPLNPLRVYNVFLLFQSMACHPDTSRQFLRAKMPNYFYPLMDTGLIDKSDECMRLAALGVIAHMLKASEDGAVNRYLMESGVVGFCVKPIEFGSTETKKVALYILDKIMSTDQGLYYCCVLADRFYVIDELLKKVLFYLSNMVRPPSSLFSLVTGCYVKLSQNSRARNGIRRYTPFLLFDGTFSRLYAEDPVAANNRIQLLQNLDN

SEQ ID NO: 33186 - protein, 322 aa, Arabidopsis thaliana
  misc_feature (1)..(322): Ceres Seq. ID no. 13602360
MSENMVNLPDSLYEDYSKLKLTSPSNASSSSSAPPPRLSVVAHPTVEMIIQWVCDIHKPKSYMSDFALHNLAYHRNDFEFLPSLLWESKNTVYIMLQEVFEAYRHLAGHISLRLFPHPLNPLRVYNVFLLFQSMACHPDTSRQFLRAKMPNYFYPLMDTGLIDKSDECMRLAALGVIAHMLKASEDGAVNRYLMESGVVGFCVKPIEFGSTETKKVALYILDKIMSTDQGLYYCCVLADRFYVIDELLKKVLFYLSNMVRPPSSLFSLVTGCYVKLSQNSRARNGIRRYTPFLLFDGTFSRLYAEDPVAANNRIQLLQNLDN

SEQ ID NO: 33187 - protein, 318 aa, Arabidopsis thaliana
  misc_feature (1)..(318): Ceres Seq. ID no. 13602361
MVNLPDSLYEDYSKLKLTSPSNASSSSSAPPPRLSVVAHPTVEMIIQWVCDIHKPKSYMSDFALHNLAYHRNDFEFLPSLLWESKNTVYIMLQEVFEAYRHLAGHISLRLFPHPLNPLRVYNVFLLFQSMACHPDTSRQFLRAKMPNYFYPLMDTGLIDKSDECMRLAALGVIAHMLKASEDGAVNRYLMESGVVGFCVKPIEFGSTETKKVALYILDKIMSTDQGLYYCCVLADRFYVIDELLKKVLFYLSNMVRPPSSLFSLVTGCYVKLSQNSRARNGIRRYTPFLLFDGTFSRLYAEDPVAANNRIQLLQNLDN

SEQ ID NO: 33188 - DNA, 798 bp, Arabidopsis thaliana
  misc_feature (1)..(798): Ceres Seq. ID no. 13602383
acagaaaaaagctctccacgcctaaaaaaaaagaaaaaagagacagaagaagaaaaagataaagaagaatcaaactttgtaaccctttagcagcaatggcgatggctttcaagatggcgacgacggggatgcgtgtgacggatgagtgtacgagttcattcatggacatgaaatggaagaaagttcatagatacatcgttttcaagatcgaagagaagtcacgtaaagtcaccgtcgataaagtcggcggcgccggtgaaagctaccacgatctcgaagattctttaccggtggatgattgtcgctacgctgtctttgatttcgactttgtcaccgtcgataactgccgcaagagcaagatcttcttcattgcatggtcaccggaggcatcaaagataagggcaaagatattgtacgcaacgtcgaaagatgggctgaggagagtgttggaagggattcactatgaacttcaagctactgatccgacggagatgggtttcgatattatccaagaccgtgccaaatagattgatcacttaagagaatatgatttgactcactttgtcaataattaacattaattaggtcatcggttaatgtttaattattgctggttagtgcttactcttttttgagtttattatccttgatcagtcttaccggcactatcctttaattatgacgtttgtgttttgattgtgttgttaaaatatttttttgtcggttaagcaaacataaaaagctacgaatttgtcctacgagtaacggatattatacatttatgagagattttatttt

SEQ ID NO: 33189 - protein, 143 aa, Arabidopsis thaliana
  misc_feature (1)..(143): Ceres Seq. ID no. 13602384
MAMAFKMATTGMRVTDECTSSFMDMKWKKVHRYIVFKIEEKSRKVTVDKVGGAGESYHDLEDSLPVDDCRYAVFDFDFVTVDNCRKSKIFFIAWSPEASKIRAKILYATSKDGLRRVLEGIHYELQATDPTEMGFDIIQDRAK

SEQ ID NO: 33190 - protein, 141 aa, Arabidopsis thaliana
  misc_feature (1)..(141): Ceres Seq. ID no. 13602385
MAFKMATTGMRVTDECTSSFMDMKWKKVHRYIVFKIEEKSRKVTVDKVGGAGESYHDLEDSLPVDDCRYAVFDFDFVTVDNCRKSKIFFIAWSPEASKIRAKILYATSKDGLRRVLEGIHYELQATDPTEMGFDIIQDRAK

SEQ ID NO: 33191 - protein, 137 aa, Arabidopsis thaliana
  misc_feature (1)..(137): Ceres Seq. ID no. 13602386
MATTGMRVTDECTSSFMDMKWKKVHRYIVFKIEEKSRKVTVDKVGGAGESYHDLEDSLPVDDCRYAVFDFDFVTVDNCRKSKIFFIAWSPEASKIRAKILYATSKDGLRRVLEGIHYELQATDPTEMGFDIIQDRAK

SEQ ID NO: 33192 - DNA, 780 bp, Arabidopsis thaliana
  misc_feature (1)..(780): Ceres Seq. ID no. 13602387
aacttcggtttagaaaaaaaaaaggagacgtcgtcgtcttctagcttctgattaagtctgataaattatgcccctaaatctgtaattctccaaggattcggattcgatcgatgaaagcttctcaaattttggcggctgcagcggcgagggttggaccggcgttaaggaagcaagtattaaccttaacggacgaagctgcttctagggttcatcatctcttgcaacagcgtcaaaaaccttttctccgattaggcgttaaggctcgtggctgcaacggcttgtcgtacactctcaattacgccgatgagaaaggtaaatttgacgagttggtagaagagaaaggtgtgaggatccttgttgaaccaaaggccttaatgcatgtgattggaacaaagatggattttgtagatgataaactcagatcagagtttgtgtttatcaatcctaactcacaaggacaatgcgggtgtggtgaatcgtttatgacaacatctacctctagtgctaagcagagtgctagttaacacacagtgatgcgtttacatttgtgattacactcatatattatactgttactggaattggcgttaatgagaaacaaatactttttaataagaattgagttttatgtttgtgcgctactttcaggcattagattggtcactttattgcatatacacattagaagctcatgttgttgcttagagatatttctgaagctatgtatttagtggaacggataatcttgagattaattaatgtattccttatccccaaagt

SEQ ID NO: 33193 - protein, 137 aa, Arabidopsis thaliana
  misc_feature (1)..(137): Ceres Seq. ID no. 13602388
MKASQILAAAAARVGPALRKQVLTLTDEAASRVHHLLQQRQKPFLRLGVKARGCNGLSYTLNYADEKGKFDELVEEKGVRILVEPKALMHVIGTKMDFVDDKLRSEFVFINPNSQGQCGCGESFMTTSTSSAKQSAS

SEQ ID NO: 33194 - DNA, 1333 bp, Arabidopsis thaliana
  misc_feature (1)..(1333): Ceres Seq. ID no. 13602401
gattgagagcaaagtctcactctcttccttaagctctgagaaacctccgataagcttatcggacaaaaagagaagtagacgccgccatggataggcttttgcaacctccttcttctcactcaattgctccctccaaattccaatcaagaccatctcccttattactccaccgtctccactcaacgaatcttagtacttttccctcctctcgccgtctcgagtcacgccgaatcagctccatttcctgcttcttccgtcagaatccatcgccggatacatctccaggattgaatcagagtagtaatttcttgattgcttcttctcaaaccgatgcgtcgaaacctaatccaggatttatccaacggatcgtgagcagttttgagcaacgcaagaccatatcggcaggaatggttatattagtctctgctatagctgcgcttttgcttaatcccattcttgtgccgcctgctttcgctagctttcaaacggctactaattctggtggagctgctgtggttggtggaaaactcctcaggactgaagtattgacaagtgcttggactggtttctttgctggttgcttacacacgttatctggacctgatcaccttgctgctttggctccactttcgattggacggacgagaatggagagtgctgcggttggagctctttggggatgtggtcatgacgctggtcagctcatctttggtttattgtttctgcttctaaaagataggctccacattgaagttataagaacttggggtacaagagttgttggtttgactctccttgtgattggtgctatgggaatcaaagaagcttctgagatgccggaaccatgtgttgttactttggagaatggggaaacagatgagaaaagcttaaagaagaaaaagatagggtttgcgacatttgcgactgggattgttcatggcctgcaaccggatgctctgatgatggtattgcctgcattggctcttccttctcggatagccggtgcttcgtttctcatcatgttcttgattgggacggtgattgcgatgggaagctacacagtttttattgggtcgtgtagcgaagcgttgaaagagaaagttcctaggatcactgagaaactaacgtgggcatcttctcttgtggccattggacttggattggcaattattgtcagccagttctttggattcagcctgtattgaagaaaacatcgtcaagtctttgtagctctctctgtaggataagattttttgcatgtaccaacaaaatttgtatctttgcttcagaatctttttcttcaatcaaatacaagtttgagtttggctccccc

SEQ ID NO: 33195 - protein, 372 aa, Arabidopsis thaliana
  misc_feature (1)..(372): Ceres Seq. ID no. 13602402
MDRLLQPPSSHSIAPSKFQSRPSPLLLHRLHSTNLSTFPSSRRLESRRISSISCFFRQNPSPDTSPGLNQSSNFLIASSQTDASKPNPGFIQRIVSSFEQRKTISAGMVILVSAIAALLLNPILVPPAFASFQTATNSGGAAVVGGKLLRTEVLTSAWTGFFAGCLHTLSGPDHLAALAPLSIGRTRMESAAVGALWGCGHDAGQLIFGLLFLLLKDRLHIEVIRTWGTRVVGLTLLVIGAMGIKEASEMPEPCVVTLENGETDEKSLKKKKIGFATFATGIVHGLQPDALMMVLPALALPSRIAGASFLIMFLIGTVIAMGSYTVFIGSCSEALKEKVPRITEKLTWASSLVAIGLGLAIIVSQFFGFSLY

SEQ ID NO: 33196 - protein, 265 aa, Arabidopsis thaliana
  misc_feature (1)..(265): Ceres Seq. ID no. 13602403
MVILVSAIAALLLNPILVPPAFASFQTATNSGGAAVVGGKLLRTEVLTSAWTGFFAGCLHTLSGPDHLAALAPLSIGRTRMESAAVGALWGCGHDAGQLIFGLLFLLLKDRLHIEVIRTWGTRVVGLTLLVIGAMGIKEASEMPEPCVVTLENGETDEKSLKKKKIGFATFATGIVHGLQPDALMMVLPALALPSRIAGASFLIMFLIGTVIAMGSYTVFIGSCSEALKEKVPRITEKLTWASSLVAIGLGLAIIVSQFFGFSLY

SEQ ID NO: 33197 - DNA, 1334 bp, Arabidopsis thaliana
  misc_feature (1)..(1334): Ceres Seq. ID no. 13602415
attaggttaggtggtcacgtttgttcatctctctcttatatatttgtttaaaggcttcgtctttgttcatttgcttttgttgatctcattacttgttcatcaatggcaagtctttgtttccaatctccttccaaacccatttcctatttccaacccaaatccaatccatcgccaccgttattcgccaaagtctccgtctttcgatgcagagcttccgtacaaaccctcgtcgccgttgagccggagccagttttcgtctccgtcaagacttttgcgccagccaccgtcgctaatttgggaccagggtttgatttcttaggatgtgccgtcgatggtctcggagaccatgtgactctccgtgtagatccctctgtacgagccggtgaggtctcaatctcggagatcaccggaaccacaacaaaactcagcacgaaccctctccggaactgcgccggaatcgctgctattgctacgatgaagatgttagggatcagatcggttggtttatcattagatttgcataaaggtcttcctttaggtagcggtttaggttctagtgcagctagtgccgccgcagctgctgtggcggttaatgagatctttggccggaaattagggagtgatcaattggtattagccggtttagaatcggaagcgaaagtctccggttatcacgctgataatatcgcaccagcgatcatgggtggattcgttttgattagaaactacgaaccacttgatttgaaaccattgaggttcccatctgataaagatctcttctttgttctagtaagccctgactttgaagctccaactaagaaaatgagagctgcattgcctacagagattccaatggttcatcatgtttggaacagtagccaagcagctgctttagtcgctgctgtgttagaaggtgacgcagtgatgcttgggaaggcattgtcgtcggataagattgtggagccgactagagcgccgttgattccgggaatggaagctgtgaagaaggcggctttagaagctggagcatttggatgtactattagcggagctggaccaacagcggttgcggtgattgattcggaggagaagggtcaagtcattggagagaagatggtggaagcgttttggaaagttggtcatttgaaatctgttgcttctgtgaagaagcttgataatgttggtgctaggcttgtcaacagcgtctccagatgatctttgtgtgctgtttgattatgttaagattggaactgtttgattatgttaagattggaaccaatcttgctctgtactgtaatttctagatgataataaagttctttgttttctacacc

SEQ ID NO: 33198 - protein, 370 aa, Arabidopsis thaliana
  misc_feature (1)..(370): Ceres Seq. ID no. 13602416
MASLCFQSPSKPISYFQPKSNPSPPLFAKVSVFRCRASVQTLVAVEPEPVFVSVKTFAPATVANLGPGFDFLGCAVDGLGDHVTLRVDPSVRAGEVSISEITGTTTKLSTNPLRNCAGIAAIATMKMLGIRSVGLSLDLHKGLPLGSGLGSSAASAAAAAVAVNEIFGRKLGSDQLVLAGLESEAKVSGYHADNIAPAIMGGFVLIRNYEPLDLKPLRFPSDKDLFFVLVSPDFEAPTKKMRAALPTEIPMVHHVWNSSQAAALVAAVLEGDAVMLGKALSSDKIVEPTRAPLIPGMEAVKKAALEAGAFGCTISGAGPTAVAVIDSEEKGQVIGEKMVEAFWKVGHLKSVASVKKLDNVGARLVNSVSR

SEQ ID NO: 33199 - protein, 246 aa, Arabidopsis thaliana
  misc_feature (1)..(246): Ceres Seq. ID no. 13602417
MKMLGIRSVGLSLDLHKGLPLGSGLGSSAASAAAAAVAVNEIFGRKLGSDQLVLAGLESEAKVSGYHADNIAPAIMGGFVLIRNYEPLDLKPLRFPSDKDLFFVLVSPDFEAPTKKMRAALPTEIPMVHHVWNSSQAAALVAAVLEGDAVMLGKALSSDKIVEPTRAPLIPGMEAVKKAALEAGAFGCTISGAGPTAVAVIDSEEKGQVIGEKMVEAFWKVGHLKSVASVKKLDNVGARLVNSVSR

SEQ ID NO: 33200 - protein, 244 aa, Arabidopsis thaliana
  misc_feature (1)..(244): Ceres Seq. ID no. 13602418
MLGIRSVGLSLDLHKGLPLGSGLGSSAASAAAAAVAVNEIFGRKLGSDQLVLAGLESEAKVSGYHADNIAPAIMGGFVLIRNYEPLDLKPLRFPSDKDLFFVLVSPDFEAPTKKMRAALPTEIPMVHHVWNSSQAAALVAAVLEGDAVMLGKALSSDKIVEPTRAPLIPGMEAVKKAALEAGAFGCTISGAGPTAVAVIDSEEKGQVIGEKMVEAFWKVGHLKSVASVKKLDNVGARLVNSVSR

SEQ ID NO: 33201 - DNA, 1189 bp, Arabidopsis thaliana
  misc_feature (1)..(1189): Ceres Seq. ID no. 13602419
acccgacccggatctattagacactcgttcttcgtcgttatcaattcggagatgattccgtttcctctgttaccaacgccgattgaaaccaactacagagcttgcaccattccttatagattcccttccgataatctcaagaaagccactcctactgaaatctcctggatcaacgtcttcgccaattccattccttctttcaagaaacgtgcagagagcgataccagtgttccagatgctcctgctagagctaaaatttttgaacaaagatatgcgggatttcttgaaggctggaagaaagatccagagagtaatggtgggccaccagatggtgttattctcggccgagttcgtgagcatttactcagagagttaggatttagggacatattcaagaaagtcaaggatgaggagaatgcaaaggctatatcactatttcctgaagttgtcagtctgagtgatgctattgaagatgacggagaacggttagagaatttggtgagagggatatttgctggaaacatctttgatcttggttctgcacagcttgctgaggttttctcaagggatggcatatctttcttggctacctctcaaaacttggttccacgaccatgggtcatcgatgacttgaacaagttccaagccaaatgggtcaagaagccttggaagaaggcagtgatttttgttgataattctggtgcagacataattttgggtattttgcctttcgcaagagagttgctccgtcgaggaattcaggtggtgctagctgctaacgagctgccagctatcaacgatgtaacatatactgagcttacagatatcgtgtcgcagttaaaggatggaaatggccaattgataggcgttgatacttcaaagcttctgattgcaaattcagggaacgatttagcggttattgatctctcaagagtatcgcacgagcttgcttacctttcatctgatgcagacttagtcatcctagaaggcatgggtcgcgggatcgagacaaacctttatgctcagttcaagtgtgattctctcaagatcggaatggtgaagcacgttgaagtagcacagtttctcggaggacgactttacgactgtgtctttaaattcaatgaagttcagagttaattacatttcaatgatattgtactgaatcatccattcgatatatcattttatc

SEQ ID NO: 33202 - protein, 378 aa, Arabidopsis thaliana
  misc_feature (1)..(378): Ceres Seq. ID no. 13602420
TRPGSIRHSFFVVINSEMIPFPLLPTPIETNYRACTIPYRFPSDNLKKATPTEISWINVFANSIPSFKKRAESDTSVPDAPARAKIFEQRYAGFLEGWKKDPESNGGPPDGVILGRVREHLLRELGFRDIFKKVKDEENAKAISLFPEVVSLSDAIEDDGERLENLVRGIFAGNIFDLGSAQLAEVFSRDGISFLATSQNLVPRPWVIDDLNKFQAKWVKKPWKKAVIFVDNSGADIILGILPFARELLRRGIQVVLAANELPAINDVTYTELTDIVSQLKDGNGQLIGVDTSKLLIANSGNDLAVIDLSRVSHELAYLSSDADLVILEGMGRGIETNLYAQFKCDSLKIGMVKHVEVAQFLGGRLYDCVFKFNEVQS

SEQ ID NO: 33203 - protein, 361 aa, Arabidopsis thaliana
  misc_feature (1)..(361): Ceres Seq. ID no. 13602421
MIPFPLLPTPIETNYRACTIPYRFPSDNLKKATPTEISWINVFANSIPSFKKRAESDTSVPDAPARAKIFEQRYAGFLEGWKKDPESNGGPPDGVILGRVREHLLRELGFRDIFKKVKDEENAKAISLFPEVVSLSDAIEDDGERLENLVRGIFAGNIFDLGSAQLAEVFSRDGISFLATSQNLVPRPWVIDDLNKFQAKWVKKPWKKAVIFVDNSGADIILGILPFARELLRRGIQVVLAANELPAINDVTYTELTDIVSQLKDGNGQLIGVDTSKLLIANSGNDLAVIDLSRVSHELAYLSSDADLVILEGMGRGIETNLYAQFKCDSLKIGMVKHVEVAQFLGGRLYDCVFKFNEVQS

SEQ ID NO: 33204 - DNA, 1332 bp, Arabidopsis thaliana
  misc_feature (1)..(1332): Ceres Seq. ID no. 13602422
ctgaagatcatcacaagcaaagaaaatggagagcgattcagagatggttccgtttcctcaactaccgatgccaatagaaaacaactacagagcttgcacaattccttacagatttccttctgatgatcccaagaaagccactccaaatgaaatctcgtggatcaacgtcttcgccaattccattccttctttcaagaaacgtgcagagagcgatatcactgttccagatgctcctgctagagctgaaaaatttgcagaaagatatgctgggattcttgaagacttgaagaaagatccagagagtcatggcggaccaccagatggcattcttctatgccgacttcgtgagcaagtactcagagagttaggatttagggacatattcaagaaagttaaggatgaggagaatgcaaaggctatatcactatttcctcaagttgtcagtctgagtgatgctattgaagatgacggaaaacggttagagaatttggtgagagggatatttgctggaaacatctttgatcttggttctgcacagcttgctgaagttttctcaagggatggtatgtctttcttggctagctgtcaaaacttggttccacgaccatgggtcattgatgacttggaaaacttccaagccaaatggatcaataagtcttggaagaaggcagtgatttttgttgataattctggtgcagacataattttgggtattttgccgtttgcaagagagttgctccgtcgaggagctcaggtggtgctggctgctaatgagctgccatctatcaatgacataacatgtaccgagcttacagaaatcttgtcacagttgaaggatgaaaatggccaattgctaggtgttgatacttcgaagcttctgattgcaaattcggggaatgacttaccagttatcgatctctcaagagtatcacaggagcttgcttacctttcatctgatgccgacttagtcatcgtagaaggcatgggtcgtggaattgagacaaacctttatgctcagttcaagtgtgattctctcaagattggaatggtgaagcatcttgaagtagcagagtttctcggaggacggctctatgactgtgtcttcaaattcaatgaagttcagagctaattagtatttcagtactctccagtctcacttctctcttactgtcatttttaattcaaaacatagggtacaaaaagtaatatttttccatcttgatatggtaaatcaatttgaaacaaaaatatttattcgtttgtgatggactgatggataaaatggaaaccataactaaaccaactatatacactctaataaagggacttgtt

SEQ ID NO: 33205 - protein, 367 aa, Arabidopsis thaliana
  misc_feature (1)..(367): Ceres Seq. ID no. 13602423
MESDSEMVPFPQLPMPIENNYRACTIPYRFPSDDPKKATPNEISWINVFANSIPSFKKRAESDITVPDAPARAEKFAERYAGILEDLKKDPESHGGPPDGILLCRLREQVLRELGFRDIFKKVKDEENAKAISLFPQVVSLSDAIEDDGKRLENLVRGIFAGNIFDLGSAQLAEVFSRDGMSFLASCQNLVPRPWVIDDLENFQAKWINKSWKKAVIFVDNSGADIILGILPFARELLRRGAQVVLAANELPSINDITCTELTEILSQLKDENGQLLGVDTSKLLIANSGNDLPVIDLSRVSQELAYLSSDADLVIVEGMGRGIETNLYAQFKCDSLKIGMVKHLEVAEFLGGRLYDCVFKFNEVQS

SEQ ID NO: 33206 - protein, 361 aa, Arabidopsis thaliana
  misc_feature (1)..(361): Ceres Seq. ID no. 13602424
MVPFPQLPMPIENNYRACTIPYRFPSDDPKKATPNEISWINVFANSIPSFKKRAESDITVPDAPARAEKFAERYAGILEDLKKDPESHGGPPDGILLCRLREQVLRELGFRDIFKKVKDEENAKAISLFPQVVSLSDAIEDDGKRLENLVRGIFAGNIFDLGSAQLAEVFSRDGMSFLASCQNLVPRPWVIDDLENFQAKWINKSWKKAVIFVDNSGADIILGILPFARELLRRGAQVVLAANELPSINDITCTELTEILSQLKDENGQLLGVDTSKLLIANSGNDLPVIDLSRVSQELAYLSSDADLVIVEGMGRGIETNLYAQFKCDSLKIGMVKHLEVAEFLGGRLYDCVFKFNEVQS

SEQ ID NO: 33207 - protein, 353 aa, Arabidopsis thaliana
  misc_feature (1)..(353): Ceres Seq. ID no. 13602425
MPIENNYRACTIPYRFPSDDPKKATPNEISWINVFANSIPSFKKRAESDITVPDAPARAEKFAERYAGILEDLKKDPESHGGPPDGILLCRLREQVLRELGFRDIFKKVKDEENAKAISLFPQVVSLSDAIEDDGKRLENLVRGIFAGNIFDLGSAQLAEVFSRDGMSFLASCQNLVPRPWVIDDLENFQAKWINKSWKKAVIFVDNSGADIILGILPFARELLRRGAQVVLAANELPSINDITCTELTEILSQLKDENGQLLGVDTSKLLIANSGNDLPVIDLSRVSQELAYLSSDADLVIVEGMGRGIETNLYAQFKCDSLKIGMVKHLEVAEFLGGRLYDCVFKFNEVQS

SEQ ID NO: 33208 - DNA, 1847 bp, Arabidopsis thaliana
  misc_feature (1)..(1847): Ceres Seq. ID no. 13602430
ctcttgatcttttagtgttcttgctttgtcgcttcaacgcttaaggtaacactgcttcttctttgatattcgcgattcatcgaacgatttcatcattatagacaaacatcctatcgatcggtttggatttgtgtgagtctgcataatcatggcgaggaagatgcttgttgatggtgagattgataaggtggcggctgatgaagccaacgcgacgcactatgattttgatttgtttgtcatcggtgccgggagtggcggtgttcgtgctgctaggttttcggctaatcatggcgctaaggttggtatttgtgagcttccatttcaccctattagctctgaggagattggaggcgttggtggaacctgtgttatccgtggttgtgttcctaaaaagattctcgtctatggagctacttacggtggtgaacttgaggatgctaaaaattatgggtgggaaataaatgagaaagtcgacttcacatggaagaagcttttgcaaaagaagactgatgagatactaagactgaataatatctacaagcggttattggcaaatgctgcggtgaaattgtatgaaggtgaaggaagagtagttggtcccaacgaagtggaggtgagacaaatagatggcacaaaaataagttataccgcaaagcacatattgattgccactggcagtcgggcgcaaaagcctaatattcctggacatgagctggctattacatctgatgaagctttgagcttggaagaatttcccaagcgtgctatagtgcttggaggagggtatattgctgtggagtttgcatcaatatggcgtggaatgggtgctactgtagatttattcttcaggaaggaacttccgctaaggggttttgatgacgaaatgagggcactagttgctagaaatcttgaaggaaggggcgttaatctgcatccacaaacaagtttgactcagttgacaaaaacagaccaggggatcaaagtcatatcgtcccatggggaggaattcgtggcagatgtcgtcctatttgctactggcagaagtcctaataccaaaagattgaatttagaagctgttggtgttgaacttgatcaggctggagctgtgaaggttgacgagtattcacgaactaatatacctagcatatgggctgtaggagatgccacaaaccgaattaaccttacacctgttgcgttaatggaggccacctgttttgcgaacactgcttttggtggaaagcctactaaagcagaatacagcaatgtcgcctgtgctgtattttgcataccaccactagctgtagtgggtctcagcgaagaagaagcagtagaacaagcaaccggtgatattctggtcttcacctcaggctttaatccaatgaagaacaccatttctggacgccaggaaaagacattgatgaagctaatagttgatgagaagagtgataaggttattggagcatccatgtgcggtcctgatgcagctgagatcatgcaggggattgcaattgcgctcaagtgtggagcaaccaaagcacaatttgatagcacggttgggatacatccatcttctgcagaggaatttgtgacaatgcgcagtgtgaccagacgcattgcccacaaacccaaacctaagacaaatctatgaaccgcaaaatataaagagctatatagcatgaaaactcggtacacttaatttgatcaaagagtcagacaacgatgagtttaatcatactcgtgtcccaataaaggatttgtaatttttgtttgtttgtatgatgcttctcttcttacttacttgagaaaacatcaaggtttcttctcttattgcttagtggaactttatt

SEQ ID NO: 33209 - protein, 499 aa, Arabidopsis thaliana; identical to SEQ ID NO: 31473
  misc_feature (1)..(499): Ceres Seq. ID no. 13602431

SEQ ID NO: 33210 - protein, 495 aa, Arabidopsis thaliana; identical to SEQ ID NO: 31474
  misc_feature (1)..(495): Ceres Seq. ID no. 13602432

SEQ ID NO: 33211 - protein, 275 aa, Arabidopsis thaliana; identical to SEQ ID NO: 31475
  misc_feature (1)..(275): Ceres Seq. ID no. 13602433

SEQ ID NO: 33212 - DNA, 1430 bp, Arabidopsis thaliana
  misc_feature (1)..(1430): Ceres Seq. ID no. 13602438
taaaaagtttgaactttccgtcgaatcaaatgggaagcggaagatatctagacgaccctttaacatttactagaaacccaccttcctcgtcgtctccaatcaccgaatctagctttctcgcagaatcgatctctcgctctggtagcttcgagagtgggagcttacgaggaggcgatggtgattgctttagcgacgtcgatttcgcacttgataaactcgctgggactgtacagttctacgagaggcatgtcttcttgtgctacaaaaaaccatccgtttggcctgcgaggatcgaagcttctgagtttgatcggttaccgaggcttctctcctccgttatatcggcgaggaagagtagtatgaagaaagagactttactcacaatatgtgagggacatgatggttcagagacatcaaatggggatgttctgatatttccagatatgatcagatacagaaggttgactcattttgatgtggacacatttgttgaggaggtgcttgtgaagggtgttgagtggttgcctggaaatcctgaatctcttagtagttcatatgtctttgtatgttgtcatggatctcgagaccggcgatgtggggtttgtggaccttctctagttagtcgattcagagaagaaattgactcgtgtggtcttcgaggtgaagtttcagtcagcccttgttctcacattggtggtcacaaatacactggagatgttatcatctatggattaaatatcaaccagagagtcacaggacactggtatggatgtgtgactctagaggatgttcctcttttgttggagcaacacattaacaaaggcgaaattgtagaccggctttggaggggtgaaatgggtctgccagaagaagatcagaagaaaactcaagaacaaaggttacaattaaacagcgaaaagatcagcaacagagaggtgactcaagaatcagttaataatagtatctgttgccagtctcgagctgtcccagagctgaacggtagtggttgccaacaaaatgggaactcctcttactgtctggaggagattcacacagagaaaaatacctcggagagagtaacctctgtaaaaaatgcatctcttcggataggaagcagcgagaatggatcttctggtggattcaaggtttgtgcggtgatgtcaatgtggttggagacttgggagagagaagatacatatgctgctttagctgttgcttgtgctgctgcatctgtggctattgcttataactgctataaacaattgaaatgaagctatgtgttttatatttagcttctatgcaatggtaattatctcagtctttagattagttgtttcctcttcgtctgtacagagttagaagagggttttaactcttaagtaagaactgcttgttgataacatatgattattatatatccatttgtaagt

SEQ ID NO: 33213 - protein, 422 aa, Arabidopsis thaliana
  misc_feature (1)..(422): Ceres Seq. ID no. 13602439
KSLNFPSNQMGSGRYLDDPLTFTRNPPSSSSPITESSFLAESISRSGSFESGSLRGGDGDCFSDVDFALDKLAGTVQFYERHVFLCYKKPSVWPARIEASEFDRLPRLLSSVISARKSSMKKETLLTICEGHDGSETSNGDVLIFPDMIRYRRLTHFDVDTFVEEVLVKGVEWLPGNPESLSSSYVFVCCHGSRDRRCGVCGPSLVSRFREEIDSCGLRGEVSVSPCSHIGGHKYTGDVIIYGLNINQRVTGHWYGCVTLEDVPLLLEQHINKGEIVDRLWRGEMGLPEEDQKKTQEQRLQLNSEKISNREVTQESVNNSICCQSRAVPELNGSGCQQNGNSSYCLEEIHTEKNTSERVTSVKNASLRIGSSENGSSGGFKVCAVMSMWLETWEREDTYAALAVACAAASVAIAYNCYKQLK

SEQ ID NO: 33214 - protein, 413 aa, Arabidopsis thaliana
  misc_feature (1)..(413): Ceres Seq. ID no. 13602440
MGSGRYLDDPLTFTRNPPSSSSPITESSFLAESISRSGSFESGSLRGGDGDCFSDVDFALDKLAGTVQFYERHVFLCYKKPSVWPARIEASEFDRLPRLLSSVISARKSSMKKETLLTICEGHDGSETSNGDVLIFPDMIRYRRLTHFDVDTFVEEVLVKGVEWLPGNPESLSSSYVFVCCHGSRDRRCGVCGPSLVSRFREEIDSCGLRGEVSVSPCSHIGGHKYTGDVIIYGLNINQRVTGHWYGCVTLEDVPLLLEQHINKGEIVDRLWRGEMGLPEEDQKKTQEQRLQLNSEKISNREVTQESVNNSICCQSRAVPELNGSGCQQNGNSSYCLEEIHTEKNTSERVTSVKNASLRIGSSENGSSGGFKVCAVMSMWLETWEREDTYAALAVACAAASVAIAYNCYKQLK

SEQ ID NO: 33215 - protein, 303 aa, Arabidopsis thaliana
  misc_feature (1)..(303): Ceres Seq. ID no. 13602441
MKKETLLTICEGHDGSETSNGDVLIFPDMIRYRRLTHFDVDTFVEEVLVKGVEWLPGNPESLSSSYVFVCCHGSRDRRCGVCGPSLVSRFREEIDSCGLRGEVSVSPCSHIGGHKYTGDVIIYGLNINQRVTGHWYGCVTLEDVPLLLEQHINKGEIVDRLWRGEMGLPEEDQKKTQEQRLQLNSEKISNREVTQESVNNSICCQSRAVPELNGSGCQQNGNSSYCLEEIHTEKNTSERVTSVKNASLRIGSSENGSSGGFKVCAVMSMWLETWEREDTYAALAVACAAASVAIAYNCYKQLK

SEQ ID NO: 33216 - DNA, 1098 bp, Arabidopsis thaliana
  misc_feature (1)..(1098): Ceres Seq. ID no. 13602446
acaacaaatcgtctccgtcttcctcgctcagcttcaacaaccagagccgacttgagattgagaatcaacgtaatcgatactctcgcaaagtctcatcctttctcagcaaaaaacactaggaaatggttgaaaggcatggagagttttgatttgctgcttaagatatatcatgtcgcagtgcgttgacggtatcaagcatttatgcacctctgttttagggtgttttgatcttgatttgtataaacaatctggtggccttggagatcctgaattgcttgcaagagacactgtttttagtgtgagtgaaatagaagctctttatgagctttttaagaaaatcagcagtgccgtgattgatgatgggctaataaacaaggaagagtttcagttggctttgtttaagacaaataaaaaagagagtttgtttgcagatcgggttttcgatttgtttgatacaaagcacaatggaatactggggtttgaggaatttgctcgtgctctctccgtctttcacccaaatgcgcctatagatgacaaaattcacttttcatttcagctatatgatcttaaacagcaagggtttatcgaacggcaagaggtgaaacaaatggttgtcgctacgcttgctgaatctggaatgaatttgaaggatactgtcattgaggatataatcgacaagacgtttgaggaagcagacacaaaacacgatggaaagatcgataaggaagagtggagaagccttgttcttagacatcccagccttctgaagaacatgactcttcaatatctcaaggatatcacgactacgtttccaagctttgtgttccattctcaggttgaagatacctgaaaaagcaaaagcaaaagcaagcagcggcaagacatcattgtattgttgaaggttgttctttcgttatggttctttatttgttacatttctaaatctctgaactcattttattttttattgagctttttttgtgaagcaaaattcttctttttagtttggtttttgtcctttttgatttcgctcggtctatctgtagatacaacttttgcatcttgatgttatggtaatgtaaagtttttcagtttatt

SEQ ID NO: 33217 - protein, 226 aa, Arabidopsis thaliana
  misc_feature (1)..(226): Ceres Seq. ID no. 13602447
MSQCVDGIKHLCTSVLGCFDLDLYKQSGGLGDPELLARDTVFSVSEIEALYELFKKISSAVIDDGLINKEEFQLALFKTNKKESLFADRVFDLFDTKHNGILGFEEFARALSVFHPNAPIDDKIHFSFQLYDLKQQGFIERQEVKQMVVATLAESGMNLKDTVIEDIIDKTFEEADTKHDGKIDKEEWRSLVLRHPSLLKNMTLQYLKDITTTFPSFVFHSQVEDT

SEQ ID NO: 33218 - DNA, 874 bp, Arabidopsis thaliana
  misc_feature (1)..(874): Ceres Seq. ID no. 13602448
acgattagaatatgagtagtgcaacgcaaaataacactgccgtttaagacgacggtcccttgacagaatcttcatcaacgctcgatttgacgtctgccgatttccttagctccgacgtaaaccactgatcgtcggtattcagctatattttgatttctcagctccaaaaattcccaacgaaatggagaaaatggccaaaggatggtttccgatgagcggcactagtagcagcggagatcagcagcagcaaccgctgcaaacaggaggaacgtctctgctagctgattggaattcttacgcagcatcgagagattttgaagaagacaccggaactttaggcttcgatatcgaatccgccgttagatctgccaacgacactgtttccggcacctttaatgttgtttcgaaaggagttagagataacctgcagtctgcaacaagtagtatgccttcaggaaaagctttgatgtatttcggtttacttctagcaagtggtgtattcttcatcttcattgccttcaccatgtttcttccagtcatggtgcttatgccacagaagtttgcaatttgttttacccttggatgtggatttatcatcggatctttcttcgctcttcgtggcccgcaaaatcaactcgctcacatgtcatcggcagagaggcttccactaactttaggtttcattgccaccatggttggcaccatatatgtctcgatggtgctccatagctacattctctctgtgattttctctgcattacaggttattgcactggcgtactactgtatatcatatttccctggtggatcatcgggaatgaagttcctcagttctactcttacctcctctgtcttccgaatgtttgggagatga

SEQ ID NO: 33219 - protein, 230 aa, Arabidopsis thaliana
  misc_feature (1)..(230): Ceres Seq. ID no. 13602449
MEKMAKGWFPMSGTSSSGDQQQQPLQTGGTSLLADWNSYAASRDFEEDTGTLGFDIESAVRSANDTVSGTFNVVSKGVRDNLQSATSSMPSGKALMYFGLLLASGVFFIFIAFTMFLPVMVLMPQKFAICFTLGCGFIIGSFFALRGPQNQLAHMSSAERLPLTLGFIATMVGTIYVSMVLHSYILSVIFSALQVIALAYYCISYFPGGSSGMKFLSSTLTSSVFRMFGR

SEQ ID NO: 33220 - protein, 227 aa, Arabidopsis thaliana
  misc_feature (1)..(227): Ceres Seq. ID no. 13602450
MAKGWFPMSGTSSSGDQQQQPLQTGGTSLLADWNSYAASRDFEEDTGTLGFDIESAVRSANDTVSGTFNVVSKGVRDNLQSATSSMPSGKALMYFGLLLASGVFFIFIAFTMFLPVMVLMPQKFAICFTLGCGFIIGSFFALRGPQNQLAHMSSAERLPLTLGFIATMVGTIYVSMVLHSYILSVIFSALQVIALAYYCISYFPGGSSGMKFLSSTLTSSVFRMFGR

SEQ ID NO: 33221 - protein, 220 aa, Arabidopsis thaliana
  misc_feature (1)..(220): Ceres Seq. ID no. 13602451
MSGTSSSGDQQQQPLQTGGTSLLADWNSYAASRDFEEDTGTLGFDIESAVRSANDTVSGTFNVVSKGVRDNLQSATSSMPSGKALMYFGLLLASGVFFIFIAFTMFLPVMVLMPQKFAICFTLGCGFIIGSFFALRGPQNQLAHMSSAERLPLTLGFIATMVGTIYVSMVLHSYILSVIFSALQVIALAYYCISYFPGGSSGMKFLSSTLTSSVFRMFGR

SEQ ID NO: 33222 - DNA, 1214 bp, Arabidopsis thaliana
  misc_feature (1)..(1214): Ceres Seq. ID no. 13602463
gaattcatcaaaggagagagagatcgacaatggcaccttcgtcatcaagcggtttaaccttcaagctacatcctttggtaatcgtcaacatatcggatcactacactagggtcaaaactcagctcaatcctcctgcttcaatctgcgcaagcggccatggctcaaacaacggcgaagcaatgttccagcaaaaccctagggtttacggatgtgtgatcggtgtccagagaggtcgtactgttgagatattcaacagtttcgagcttttatatgatccttctactcaaacccttgatagatctttcctcgagaagaagcaagagctctataagaaggtgttccctgatttctatattctgggatggtactctacgggaagtgatgctgaggaatctgatatgcatatccataaagctttgatggatatcaatgaatctcctgtttatgtgcttttaaaccctgctatcaatcacacacagaaggatcttccagtgactatttatgaaagtgaattgcatgtcattgatggaatcccgcagctaattttcgctcatacaagctacacaatcgagacagttgaagctgaacggatatcagttgatcatgttgcacatcttaaaccatctgacggaggctcagcagcaacccagttggctgctcatcttactggtatacatagtgccatcaagatgcttaatagcagaatcagagtgctttaccaaaatcttgctgcaatgcagaaaggtgataaatcttgtgacaactcagttctgagacaagtatctagcctgctaagaagattgcctgccatggaatcagagagatttcaagataatttcttgatggagtacaacgacaaattactaataacttacctagcgatgattacaaattgttccagcaacatgaacgagatggtcgacaaattcaacaccgcatatgacagaaacactcgaagaggtggaagaactgcattcatgtaaaagatcctttccagcgattctagttctaaagatcttctcttggttcctgaaaccatttttaacattgcctctgtgagaatctataactcagacggcaagactttatcctcttcattgtttctatatctataagaacatctgcttatctatcaaagctcttgtttgatcttgaacaagtttctattgttagtaaaaagattttaaggtttgattctatcagtctctctagtt

SEQ ID NO: 33223 - protein, 326 aa, Arabidopsis thaliana
  misc_feature (1)..(326): Ceres Seq. ID no. 13602464
IHQRRERSTMAPSSSSGLTFKLHPLVIVNISDHYTRVKTQLNPPASICASGHGSNNGEAMFQQNPRVYGCVIGVQRGRTVEIFNSFELLYDPSTQTLDRSFLEKKQELYKKVFPDFYILGWYSTGSDAEESDMHIHKALMDINESPVYVLLNPAINHTQKDLPVTIYESELHVIDGIPQLIFAHTSYTIETVEAERISVDHVAHLKPSDGGSAATQLAAHLTGIHSAIKMLNSRIRVLYQNLAAMQKGDKSCDNSVLRQVSSLLRRLPAMESERFQDNFLMEYNDKLLITYLAMITNCSSNMNEMVDKFNTAYDRNTRRGGRTAFM

SEQ ID NO: 33224 - protein, 317 aa, Arabidopsis thaliana
  misc_feature (1)..(317): Ceres Seq. ID no. 13602465
MAPSSSSGLTFKLHPLVIVNISDHYTRVKTQLNPPASICASGHGSNNGEAMFQQNPRVYGCVIGVQRGRTVEIFNSFELLYDPSTQTLDRSFLEKKQELYKKVFPDFYILGWYSTGSDAEESDMHIHKALMDINESPVYVLLNPAINHTQKDLPVTIYESELHVIDGIPQLIFAHTSYTIETVEAERISVDHVAHLKPSDGGSAATQLAAHLTGIHSAIKMLNSRIRVLYQNLAAMQKGDKSCDNSVLRQVSSLLRRLPAMESERFQDNFLMEYNDKLLITYLAMITNCSSNMNEMVDKFNTAYDRNTRRGGRTAFM

SEQ ID NO: 33225 - protein, 267 aa, Arabidopsis thaliana
  misc_feature (1)..(267): Ceres Seq. ID no. 13602466
MFQQNPRVYGCVIGVQRGRTVEIFNSFELLYDPSTQTLDRSFLEKKQELYKKVFPDFYILGWYSTGSDAEESDMHIHKALMDINESPVYVLLNPAINHTQKDLPVTIYESELHVIDGIPQLIFAHTSYTIETVEAERISVDHVAHLKPSDGGSAATQLAAHLTGIHSAIKMLNSRIRVLYQNLAAMQKGDKSCDNSVLRQVSSLLRRLPAMESERFQDNFLMEYNDKLLITYLAMITNCSSNMNEMVDKFNTAYDRNTRRGGRTAFM

SEQ ID NO: 33226 - DNA, 959 bp, Arabidopsis thaliana
  misc_feature (1)..(959): Ceres Seq. ID no. 13602473
atcattcatcaacatcatctctctttctctatctcgctgtccctccttctctttctcattcattgcaatgggcagaagatgctcacactgtggaaacgtaggacataactcaagaacatgttcttcttaccaaacaagagtagttaggctctttggtgttcatctagacaccacaagctcttctccgccgcctcctcctcctccctcgattttggccgctgcaataaagaaaagtttcagcatggattgcttgccggcatgttcctcctcttcctcttcctttgctggttatctctccgatggtctcgcccataaaacacctgaccgcaaaaaaggggttccatggacggcggaagagcaccggacgtttctaattggattagaaaagcttggaaaaggagattggagaggaatctctagaaacttcgtcgtcacaaaatccccgacacaagtggcaagtcatgctcaaaaatactttctccggcaaactaccactctccatcacaagagacgccgcaccagcctctttgatatggtttcggccggcaatgttgaagaaaatagtactactaagaggatatgtaatgatcatattgggtcgagctcaaaggttgtttggaaacaaggattactcaatcctcgtcttggatatccagatccgaaagtatcagtatccggctcgggtaactccggtggactcgatcttgagctgaagcttgcgtccattcaatctcctgaatcgaatattagacctattagcgttacgtgaatctatataacacgttatgatcagtttcattagaataattcaaatgtttacatatataatatcttatcgatcctatctaatttgattttgatttaacgttagttactttgataatttcgtcgatattgtttttttggttttttcattgtgagattttttgtcttggaagttggatccatacatatttctg

SEQ ID NO: 33227 - protein, 255 aa, Arabidopsis thaliana
  misc_feature (1)..(255): Ceres Seq. ID no. 13602474
SFINIISLSLSRCPSFSFSFIAMGRRCSHCGNVGHNSRTCSSYQTRVVRLFGVHLDTTSSSPPPPPPPSILAAAIKKSFSMDCLPACSSSSSSFAGYLSDGLAHKTPDRKKGVPWTAEEHRTFLIGLEKLGKGDWRGISRNFVVTKSPTQVASHAQKYFLRQTTTLHHKRRRTSLFDMVSAGNVEENSTTKRICNDHIGSSSKVVWKQGLLNPRLGYPDPKVSVSGSGNSGGLDLELKLASIQSPESNIRPISVT

SEQ ID NO: 33228 - protein, 233 aa, Arabidopsis thaliana
  misc_feature (1)..(233): Ceres Seq. ID no. 13602475
MGRRCSHCGNVGHNSRTCSSYQTRVVRLFGVHLDTTSSSPPPPPPPSILAAAIKKSFSMDCLPACSSSSSSFAGYLSDGLAHKTPDRKKGVPWTAEEHRTFLIGLEKLGKGDWRGISRNFVVTKSPTQVASHAQKYFLRQTTTLHHKRRRTSLFDMVSAGNVEENSTTKRICNDHIGSSSKVVWKQGLLNPRLGYPDPKVSVSGSGNSGGLDLELKLASIQSPESNIRPISVT

SEQ ID NO: 33229 - protein, 175 aa, Arabidopsis thaliana
  misc_feature (1)..(175): Ceres Seq. ID no. 13602476
MDCLPACSSSSSSFAGYLSDGLAHKTPDRKKGVPWTAEEHRTFLIGLEKLGKGDWRGISRNFVVTKSPTQVASHAQKYFLRQTTTLHHKRRRTSLFDMVSAGNVEENSTTKRICNDHIGSSSKVVWKQGLLNPRLGYPDPKVSVSGSGNSGGLDLELKLASIQSPESNIRPISVT

SEQ ID NO: 33230 - DNA, 1006 bp, Arabidopsis thaliana
  misc_feature (1)..(1006): Ceres Seq. ID no. 13602513
aaattggggaagaaaatttacagtgttgaaattggttaaaccctgacactagcaccttcctcagtcgcatcaccaccatgtcagagcgcgaccgccgcgaacgagagagggataaggaccgtgaaccagaccgtgatagacgccgaggtagagacgaccgtgaccgtgaccgtgatcgagaccgggaaagagatagagagcgcgaccgtgaccgagggcttagaaacaaaaaatcccgatctcgtactccagaccaccacgctcgtgctcgccacgtgcgctctccggagaggtatcgctctcgttcccgctcgattgaccgtgaccgggaccgggaccgtcaacgacaccacaggcgcaggtctccttctccagatgctccgtcgcgaaaacggcctcgccagggttcagtagacgatgagaaagaaaggaatcgcaaaagagtagtgactgattccgttgacgagaatgcgtctactattactaagaagaaggataaacaaccaagtgatgctgctgataatggcggaggcgaagatgaagaaggaatggatgtgaatgagattgagatgatgaagatgttagggattcctactggatttgattccacaaaaggcaaaccagttgctggtgctgatgttagtggtattagagctgtaactaagcgtcagccaagacagtacatgaaccgtcgcggtggatttaaccgtcctctaccggccgagcgtaatcgctagtcttctcaaggtccctctaacgctgtcttgaacactagtcaaaaagatgagggctagagctgcatttcccagatagtagttactagttactccaattcttccccagactctgttctgatgtcttatagagaacaaacttgtactctctgaatttggttggaaacaactcgtgagttatttctttttcgagatttaaaaatgttaatgtttgtgtgtaatctcccggctctaactgtcagactatggttcatttgaaatcaggcttattc

SEQ ID NO: 33231 - protein, 219 aa, Arabidopsis thaliana
  misc_feature (1)..(219): Ceres Seq. ID no. 13602514
MSERDRRERERDKDREPDRDRRRGRDDRDRDRDRDRERDRERDRDRGLRNKKSRSRTPDHHARARHVRSPERYRSRSRSIDRDRDRDRQRHHRRRSPSPDAPSRKRPRQGSVDDEKERNRKRVVTDSVDENASTITKKKDKQPSDAADNGGGEDEEGMDVNEIEMMKMLGIPTGFDSTKGKPVAGADVSGIRAVTKRQPRQYMNRRGGFNRPLPAERNR

SEQ ID NO: 33232 - DNA, 1382 bp, Arabidopsis thaliana
  misc_feature (1)..(1382): Ceres Seq. ID no. 13602523
gtccaaattagagaataagtaactcaagaaggagtgaaatcaacacaaaacacaatgatgatccttaggctggctctagccatcgtcatctccacctatgcaaccgcacaaccagcatcaacatcgtcgcttgtaacctatatattcggcgactcgctaaccgaagttggtaacaacaatttcttgcaatattcgctagcaagagcagactttccatattatggagttgatttctccggtggtaaagctaccggaagattcaccaacggtagaactatcggcgatatcatatctacgaagctcgggattctatcgccaccaccatatctatcgttatcacaaaacgacgatgcatttctcagtggtataaattacgcatctggaggagctggaattctcaatgaaactggcatttacttcatccaaaggctaactttcaatgatcaaataaattgtttcaagaaaactaaagaagttattagggcgaaaatcggagatggagctgcgaacaagcatgtaaatgatgccatgtacttcattggtttgggaagcaacgattatgtaaacaatttcttgcagccatttatggcagatgggcagcaatatacacatgacgagtttgtcgaactcttgacctcaaccctacacaatcagcttacgacaatatacaaattaggagcgaggaaggtaatatttcatgggttaggcccattgggctgtatcccatcacagagagtgaagtcaaagacacgcatgtgcctgaaccgtgtcaacgaatgggtattggaattcaattcaagaacgaagaagctattaatagatctcaacaaacgcctccccggagctaaattctctttcgcagacacttatcccgccgttctcgatctcatcaacaatcccactcactacggatttaagatagcaaacacgtcatgttgcaatgtggacacaagtgttggaggtctttgtcttcccaattccaagatgtgtaaaaaccgtcaagactttgtcttctgggacgcatttcatccgtccgattcggctaatcaaatcctagccgatcatcttttctcttctcttctttcttcctcttctccttctcctgctcctaaaccacgtcaatagtttagcatttacaaaaataaaaacagttaaccaatttttgttaaattggacctacttgctatatacatgtgtaactaattttatgttcttgatgtaaccatcaggacaaatatgtgtgttttgttacacaagtattatatattataagataattatggtttgtatgtatcatgaacacattgttatatatacacatatattcgtgtttagtgtttctagacatgtgttataaataaacatctacaccaattttggtc

SEQ ID NO: 33233 - protein, 356 aa, Arabidopsis thaliana
  misc_feature (1)..(356): Ceres Seq. ID no. 13602524
MMILRLALAIVISTYATAQPASTSSLVTYIFGDSLTEVGNNNFLQYSLARADFPYYGVDFSGGKATGRFTNGRTIGDIISTKLGILSPPPYLSLSQNDDAFLSGINYASGGAGILNETGIYFIQRLTFNDQINCFKKTKEVIRAKIGDGAANKHVNDAMYFIGLGSNDYVNNFLQPFMADGQQYTHDEFVELLTSTLHNQLTTIYKLGARKVIFHGLGPLGCIPSQRVKSKTRMCLNRVNEWVLEFNSRTKKLLIDLNKRLPGAKFSFADTYPAVLDLINNPTHYGFKIANTSCCNVDTSVGGLCLPNSKMCKNRQDFVFWDAFHPSDSANQILADHLFSSLLSSSSPSPAPKPRQ

SEQ ID NO: 33234 - protein, 355 aa, Arabidopsis thaliana
  misc_feature (1)..(355): Ceres Seq. ID no. 13602525
MILRLALAIVISTYATAQPASTSSLVTYIFGDSLTEVGNNNFLQYSLARADFPYYGVDFSGGKATGRFTNGRTIGDIISTKLGILSPPPYLSLSQNDDAFLSGINYASGGAGILNETGIYFIQRLTFNDQINCFKKTKEVIRAKIGDGAANKHVNDAMYFIGLGSNDYVNNFLQPFMADGQQYTHDEFVELLTSTLHNQLTTIYKLGARKVIFHGLGPLGCIPSQRVKSKTRMCLNRVNEWVLEFNSRTKKLLIDLNKRLPGAKFSFADTYPAVLDLINNPTHYGFKIANTSCCNVDTSVGGLCLPNSKMCKNRQDFVFWDAFHPSDSANQILADHLFSSLLSSSSPSPAPKPRQ

SEQ ID NO: 33235 - protein, 198 aa, Arabidopsis thaliana
  misc_feature (1)..(198): Ceres Seq. ID no. 13602526
MYFIGLGSNDYVNNFLQPFMADGQQYTHDEFVELLTSTLHNQLTTIYKLGARKVIFHGLGPLGCIPSQRVKSKTRMCLNRVNEWVLEFNSRTKKLLIDLNKRLPGAKFSFADTYPAVLDLINNPTHYGFKIANTSCCNVDTSVGGLCLPNSKMCKNRQDFVFWDAFHPSDSANQILADHLFSSLLSSSSPSPAPKPRQ

SEQ ID NO: 33236 - DNA, 760 bp, Arabidopsis thaliana
  misc_feature (1)..(760): Ceres Seq. ID no. 13602531
aaagagagacgactctgaatccaaaaaaaaaaaaaactcattaagtaaagacaaaggaagagaagaaagacgatttctcgaagaagctatggcggatcaactcactgacgaacagatctccgaattcaaggaagcttttagcctcttcgacaaagatggcgatggttgcatcacaacaaaagagctgggaacagttatgcgttcactaggacaaaacccaacagaggctgagctccaagacatgatcaacgaggttgatgcagatggaaacggcactatcgacttccccgagttcctgaacctgatggctaagaagatgaaagacactgactccgaggaagagctaaaagaagccttcagggttttcgacaaagaccagaacggtttcatctccgctgctgagctacgccatgtgatgaccaatcttggtgagaagctaactgatgaagaagtggaagagatgatccgtgaggctgatgttgatggagatggtcagattaactatgaagagtttgtcaagattatgatggctaagtgatttgataaaggtgatgatgatgatgatgatgacctttttatgcttctaggagtttaaccaaaaacatttgcatgattggtggagatatgcttttaaacagacataatttgtttttcgttcttttgattttctggtttgtgacttttgtgtgtaatggaaaatcaagtaagttggattgaaaccgatgggttgggtttttactttttacccacattttgttgc

SEQ ID NO: 33237 - protein, 178 aa, Arabidopsis thaliana
  misc_feature (1)..(178): Ceres Seq. ID no. 13602532
KRDDSESKKKKNSLSKDKGREERRFLEEAMADQLTDEQISEFKEAFSLFDKDGDGCITTKELGTVMRSLGQNPTEAELQDMINEVDADGNGTIDFPEFLNLMAKKMKDTDSEEELKEAFRVFDKDQNGFISAAELRHVMTNLGEKLTDEEVEEMIREADVDGDGQINYEEFVKIMMAK

SEQ ID NO: 33238 - protein, 149 aa, Arabidopsis thaliana; identical to SEQ ID NO: 31367
  misc_feature (1)..(149): Ceres Seq. ID no. 13602533

SEQ ID NO: 33239 - protein, 113 aa, Arabidopsis thaliana; identical to SEQ ID NO: 31368
  misc_feature (1)..(113): Ceres Seq. ID no. 13602534

SEQ ID NO: 33240 - DNA, 1870 bp, Arabidopsis thaliana
  misc_feature (1)..(1870): Ceres Seq. ID no. 13602535
ataaactttataagaaaaataaatacatattctctttctcttccatcaagcaaagcttttcaaaaagaatcaaacttttcgaatctttttgcttctcgagatctgttcatagagagagagataaagaatgggtttttatgaaggagcctctgttcatccaagaactccagaaaacaaaaacacagtgaatattccgatactcacttcttcttcttcatcatcagatcttgacggagataacaatgacaacaacaacaatacaggaatcaaaacccttttgaaaagaatgatctttgatttgggtttcgcttgtttccttcctcctttaagctcaaccgaaaactccggcaacaacaatggaggaggaacaagcggcggcggaggaggaggaggaggaggaggagagaataacaaagcttggctattggcggaaacagcaccggagaatatgaatcctgatcctcattcagttcattcatcgtttagattcagtctttgttcacaaatcgagcttgagaaaatgaaaggtgaagaaccgtccttgtctgcttcgtcttcttgtcggaatttgtcggtttctggtggttccacgacggttttgatggttaatttggagaatggtgttaaggagactactgggaatgcgactgatgatttgcggtggactagagctaggtcgcttgagaagagtatttctccggtggctaatactttggttcggtttagctacggtgagattgtggcagctactcgtaatttctctaaagggagagtgttgggaagaggagcttgtagctatgtgtttagaggcaaaatcggaatgtggagaacggctttagcaatcaagagacttgataaggaagacaaagaatctcctaaatctttttgtagagagttgatgattgcaagctctcttcatagctccaacattgtacctcttcttggattctgtattgatcctgaagaagggttattcttggtttacaagtatgtctctggtggtagcctcgaacattatttacacgataagaagaagaagaaaggcgtaaaagccgcttttggtttgccttggtcagcaaggtacaaggtagcgttaggtatagcagatgccatagcttatttgcataatggaacagagcaatgtgttgttcacagagatatcaaaccctccaatattcttctttcctcaaagaaaataccaaagttgtgtgattttgggttagctacttggaccgctgcaccttcggttcctttcctctgcaagaccgtgaaaggcacattcggctatctggctcctgagtatttccagcatggtaagatatctgacaagaccgatgtttacgccttcggggttgtgttgcttgagctaataactggccggaaaccaatcgaagcaagaagagcatctggtcaagaaaatctggttgtttgggcgaaaccgttgttggatagagggatagaagctatagtggagctgcttgatccaaggctaaaatgcacaagaaaaaactcggttcaaatggagcggatgatccgtgctgcagcggcgtgtgtgatcaatgaggagtcccgaagacccggtatggaagagattgtctcaatcttgaaaggcgaagaaggtgtagagccagaaacacattcaagcaggaaaactacaaatatttcgggtatgattgactcttatacacaattgcaacaaaccaaatccgagatgaaatgtcatcttgatcttgcgatgctcggagtaaccgagtttgaagatgatgatcatgtgtacggccgataaaagattctaagaaatggatttaaaagtgtgtaaataggtatttatgaaaagtttgaaacagagttcttagtttctgaattagtg

SEQ ID NO: 33241 - protein, 552 aa, Arabidopsis thaliana
  misc_feature (1)..(552): Ceres Seq. ID no. 13602536
MGFYEGASVHPRTPENKNTVNIPILTSSSSSSDLDGDNNDNNNNTGIKTLLKRMIFDLGFACFLPPLSSTENSGNNNGGGTSGGGGGGGGGGENNKAWLLAETAPENMNPDPHSVHSSFRFSLCSQIELEKMKGEEPSLSASSSCRNLSVSGGSTTVLMVNLENGVKETTGNATDDLRWTRARSLEKSISPVANTLVRFSYGEIVAATRNFSKGRVLGRGACSYVFRGKIGMWRTALAIKRLDKEDKESPKSFCRELMIASSLHSSNIVPLLGFCIDPEEGLFLVYKYVSGGSLEHYLHDKKKKKGVKAAFGLPWSARYKVALGIADAIAYLHNGTEQCVVHRDIKPSNILLSSKKIPKLCDFGLATWTAAPSVPFLCKTVKGTFGYLAPEYFQHGKISDKTDVYAFGVVLLELITGRKPIEARRASGQENLVVWAKPLLDRGIEAIVELLDPRLKCTRKNSVQMERMIRAAAACVINEESRRPGMEEIVSILKGEEGVEPETHSSRKTTNISGMIDSYTQLQQTKSEMKCHLDLAMLGVTEFEDDDHVYGR

SEQ ID NO: 33242 - protein, 499 aa, Arabidopsis thaliana
  misc_feature (1)..(499): Ceres Seq. ID no. 13602537
MIFDLGFACFLPPLSSTENSGNNNGGGTSGGGGGGGGGGENNKAWLLAETAPENMNPDPHSVHSSFRFSLCSQIELEKMKGEEPSLSASSSCRNLSVSGGSTTVLMVNLENGVKETTGNATDDLRWTRARSLEKSISPVANTLVRFSYGEIVAATRNFSKGRVLGRGACSYVFRGKIGMWRTALAIKRLDKEDKESPKSFCRELMIASSLHSSNIVPLLGFCIDPEEGLFLVYKYVSGGSLEHYLHDKKKKKGVKAAFGLPWSARYKVALGIADAIAYLHNGTEQCVVHRDIKPSNILLSSKKIPKLCDFGLATWTAAPSVPFLCKTVKGTFGYLAPEYFQHGKISDKTDVYAFGVVLLELITGRKPIEARRASGQENLVVWAKPLLDRGIEAIVELLDPRLKCTRKNSVQMERMIRAAAACVINEESRRPGMEEIVSILKGEEGVEPETHSSRKTTNISGMIDSYTQLQQTKSEMKCHLDLAMLGVTEFEDDDHVYGR

SEQ ID NO: 33243 - protein, 445 aa, Arabidopsis thaliana
  misc_feature (1)..(445): Ceres Seq. ID no. 13602538
MNPDPHSVHSSFRFSLCSQIELEKMKGEEPSLSASSSCRNLSVSGGSTTVLMVNLENGVKETTGNATDDLRWTRARSLEKSISPVANTLVRFSYGEIVAATRNFSKGRVLGRGACSYVFRGKIGMWRTALAIKRLDKEDKESPKSFCRELMIASSLHSSNIVPLLGFCIDPEEGLFLVYKYVSGGSLEHYLHDKKKKKGVKAAFGLPWSARYKVALGIADAIAYLHNGTEQCVVHRDIKPSNILLSSKKIPKLCDFGLATWTAAPSVPFLCKTVKGTFGYLAPEYFQHGKISDKTDVYAFGVVLLELITGRKPIEARRASGQENLVVWAKPLLDRGIEAIVELLDPRLKCTRKNSVQMERMIRAAAACVINEESRRPGMEEIVSILKGEEGVEPETHSSRKTTNISGMIDSYTQLQQTKSEMKCHLDLAMLGVTEFEDDDHVYGR

SEQ ID NO: 33244 - DNA, 1252 bp, Arabidopsis thaliana
  misc_feature (1)..(1252): Ceres Seq. ID no. 13602539
aggaaattatcatcttcgtccctaccaaatttttcagcagcgaaaatggcaaacatcagcgtagtgacgacagcgactaacaaccaggtgattctccgtaactacgtgagtggattccctaaagaatccgacctctacatcgccgcaaccaccgttgacttacgtgtacctcccggatccatggcggttctagtcaagaatctctacttatcttgcgatcctttcagccgcattcgcatggaaaaacccgacccttcgtcacctgcttccgtcgctcgcgcttactctatcggcaagccaatctctggatttggagtggctaaagcaatagattcatgtcatccaaattacaaaacaggagatttactttggggaagagttggatgggaagagtatagtgttattactccaactccttcttcacatttcaagattcatcacactgatgttccattatctttctacactggacttcttggtattccgggtctcactgcgtatgttgggttttacgagatatgttctccgaagaaaggagagactgtatttgtatcagctgcttctggtgcagtaggtcaacttgtaggacagtttgcgaagatggcgggatgctatgtcgttggaagtgccagtagtaaagagaaggttgatcttctcaagactaagttcgggtatgacgaagctttcaattacaaggaagagcatgatcttagtgctgccctaaagaggtgtttcccagaaggaatagacatatactttgagaatgtgggaggtaaaatgttagacgcagtgctcgaaaacatgagaacacatggccgaatcgctgcgtgtggaatgatctcacaatacaatctaaaggagccagaaggtgtacataacttagccagcattgtttacaaacggattcgggttcaaggttttgcagctgtagaattctttgataaatactccaagtttttggactttatacttccatatgtaagagaaggaaagataacatatgtcgaggatatagctcaaggacttgagaatggaccttctgctttgattggactcttccacggtaagaacgtcgggaaacaacttgttgcggttgctcgtgagtgatattgaattaataaatgtggttattatgacaaagctttgtttgtaggtcagaaataattggactattgttaattgtttactatatcgtaatagtccgctggtttaattatgttgtttgtgtgatattatatgcataaaggttctc

SEQ ID NO: 33245 - protein, 368 aa, Arabidopsis thaliana
  misc_feature (1)..(368): Ceres Seq. ID no. 13602540
RKLSSSSLPNFSAAKMANISVVTTATNNQVILRNYVSGFPKESDLYIAATTVDLRVPPGSMAVLVKNLYLSCDPFSRIRMEKPDPSSPASVARAYSIGKPISGFGVAKAIDSCHPNYKTGDLLWGRVGWEEYSVITPTPSSHFKIHHTDVPLSFYTGLLGIPGLTAYVGFYEICSPKKGETVFVSAASGAVGQLVGQFAKMAGCYVVGSASSKEKVDLLKTKFGYDEAFNYKEEHDLSAALKRCFPEGIDIYFENVGGKMLDAVLENMRTHGRIAACGMISQYNLKEPEGVHNLASIVYKRIRVQGFAAVEFFDKYSKFLDFILPYVREGKITYVEDIAQGLENGPSALIGLFHGKNVGKQLVAVARE

SEQ ID NO: 33246 - protein, 353 aa, Arabidopsis thaliana
  misc_feature (1)..(353): Ceres Seq. ID no. 13602541
MANISVVTTATNNQVILRNYVSGFPKESDLYIAATTVDLRVPPGSMAVLVKNLYLSCDPFSRIRMEKPDPSSPASVARAYSIGKPISGFGVAKAIDSCHPNYKTGDLLWGRVGWEEYSVITPTPSSHFKIHHTDVPLSFYTGLLGIPGLTAYVGFYEICSPKKGETVFVSAASGAVGQLVGQFAKMAGCYVVGSASSKEKVDLLKTKFGYDEAFNYKEEHDLSAALKRCFPEGIDIYFENVGGKMLDAVLENMRTHGRIAACGMISQYNLKEPEGVHNLASIVYKRIRVQGFAAVEFFDKYSKFLDFILPYVREGKITYVEDIAQGLENGPSALIGLFHGKNVGKQLVAVARE

SEQ ID NO: 33247 - protein, 308 aa, Arabidopsis thaliana
  misc_feature (1)..(308): Ceres Seq. ID no. 13602542
MAVLVKNLYLSCDPFSRIRMEKPDPSSPASVARAYSIGKPISGFGVAKAIDSCHPNYKTGDLLWGRVGWEEYSVITPTPSSHFKIHHTDVPLSFYTGLLGIPGLTAYVGFYEICSPKKGETVFVSAASGAVGQLVGQFAKMAGCYVVGSASSKEKVDLLKTKFGYDEAFNYKEEHDLSAALKRCFPEGIDIYFENVGGKMLDAVLENMRTHGRIAACGMISQYNLKEPEGVHNLASIVYKRIRVQGFAAVEFFDKYSKFLDFILPYVREGKITYVEDIAQGLENGPSALIGLFHGKNVGKQLVAVARE

SEQ ID NO: 33248 - DNA, 1302 bp, Arabidopsis thaliana
  misc_feature (1)..(1302): Ceres Seq. ID no. 13602547
gttcaatcattttctcctttccttcacctcaagatctcaaaaacacaaaaagagaaatcaatcaaaaccttagggttttctactaatttatctgtgtgatgttaagagaatcatcatcatcttcgtcgtcatgggaggagtaacttcatcaatcgctgcaaaattcgcttttttcccgccatcaccaccgtcttatggatttgtttccgacgttgaccgattatacataacagaagtacctcgccgtgatgatgtagatgtattgaagctaaagactcgtcgtggtaacgagattgtagctatttatattaaacatcctaaagctaatggtacgcttttgtattcacatggtaacgctgctgatttgggtcaaatgtttgagctttttatcgaacttagtaatcgtctccgacttaatctcatggggtatgattactctggttatggtcagtctactggaaaggcaagtgaatgtaatacctatgctgatatagatgcagcatatacttgcctcaaggaacattatggtgtaaaagatgatcaactgatattatatggtcagtctgttggtagtggaccaacgattgatttagcttcacgcacgcctaatttgcgaggagtggttttgcacagccctattctctctgggatgagagttttgtatccggttaaacgtacctattggtttgacatttacaagaatattgacaagatcggtgcagttacctgtcctgtcttagtaatccatgggactgcagatgaagtggttgattgttctcatggaaaacaactttgggaactttcaaaagaaaagtatgagcctttatgggtatctggaggaggacactgcaatctagaactctatccagagttcataaaacatctgaagaaatacgtaatttctatttccaagggaccaagaactggttcgaacaagactgcaacgacggatgcagccaaaaaacagagcaagcctgcagagaacgggcgtgctgatacgtttcaacttggctgttgccttccagaagtttctagaaacagtgtagacagtcagctggagaaatctaagaagactagtaaacccgagaagtctcgtatgagcattgataggtttagaaggaaaaaaggttcagtctggtgacatataaaggtccatcgacaaaacaggttatttgtaactcctgtttctgtaattcatatgtttctgcataaaattatgacgtgtggttttgtttttttctttctcaggtttgtgtatgtattttctaatagaaacagatcaaactcaaaagtcttgatttc

SEQ ID NO: 33249 - protein, 336 aa, Arabidopsis thaliana
  misc_feature (1)..(336): Ceres Seq. ID no. 13602548
MGGVTSSIAAKFAFFPPSPPSYGFVSDVDRLYITEVPRRDDVDVLKLKTRRGNEIVAIYIKHPKANGTLLYSHGNAADLGQMFELFIELSNRLRLNLMGYDYSGYGQSTGKASECNTYADIDAAYTCLKEHYGVKDDQLILYGQSVGSGPTIDLASRTPNLRGVVLHSPILSGMRVLYPVKRTYWFDIYKNIDKIGAVTCPVLVIHGTADEVVDCSHGKQLWELSKEKYEPLWVSGGGHCNLELYPEFIKHLKKYVISISKGPRTGSNKTATTDAAKKQSKPAENGRADTFQLGCCLPEVSRNSVDSQLEKSKKTSKPEKSRMSIDRFRRKKGSVW

SEQ ID NO: 33250 - protein, 255 aa, Arabidopsis thaliana
  misc_feature (1)..(255): Ceres Seq. ID no. 13602549
MFELFIELSNRLRLNLMGYDYSGYGQSTGKASECNTYADIDAAYTCLKEHYGVKDDQLILYGQSVGSGPTIDLASRTPNLRGVVLHSPILSGMRVLYPVKRTYWFDIYKNIDKIGAVTCPVLVIHGTADEVVDCSHGKQLWELSKEKYEPLWVSGGGHCNLELYPEFIKHLKKYVISISKGPRTGSNKTATTDAAKKQSKPAENGRADTFQLGCCLPEVSRNSVDSQLEKSKKTSKPEKSRMSIDRFRRKKGSVW

SEQ ID NO: 33251 - protein, 239 aa, Arabidopsis thaliana
  misc_feature (1)..(239): Ceres Seq. ID no. 13602550
MGYDYSGYGQSTGKASECNTYADIDAAYTCLKEHYGVKDDQLILYGQSVGSGPTIDLASRTPNLRGVVLHSPILSGMRVLYPVKRTYWFDIYKNIDKIGAVTCPVLVIHGTADEVVDCSHGKQLWELSKEKYEPLWVSGGGHCNLELYPEFIKHLKKYVISISKGPRTGSNKTATTDAAKKQSKPAENGRADTFQLGCCLPEVSRNSVDSQLEKSKKTSKPEKSRMSIDRFRRKKGSVW

SEQ ID NO: 33252 - DNA, 1552 bp, Arabidopsis thaliana
  misc_feature (1)..(1552): Ceres Seq. ID no. 13602571
aattcgaacccttcaagattttcttctctctatctctctgtttctctctgtttctgagatgggtttgtttggaacgaagaagatcgggaagtatgagataggaagaacaatcggagaagggaatttcgcaaaagtgaaacttggttacgacacgaccaatggtacttacgtagctgtcaaaatcatagacaaggctttggttattcaaaagggtcttgagtctcaagtcaagagagagatacgaacgatgaagcttcttaaccatcccaacatcgtccaaatacacgaggtgattggaaccaagacaaagatctgtatagttatggaatacgtttcaggtggtcagctttcagacagacttggaagacagaaaatgaaagaatcagatgctagaaaacttttccaacaattgattgatgctgttgattattgtcataacagaggagtttatcatagagatcttaagccacaaaacttgttactagattcaaagggtaatctcaaagtttctgactttggattaagtgcagttcctaaatcgggggatatgctctctacagcttgtggctctccatgttatatagcaccagagttgattatgaacaaaggctactcaggagcagcagtagatgtatggtcttgtggagtgattctatttgaattgcttgctggttatccacctttcgatgatcatacacttccggttttgtataagaagatactcagagcagattacacgttcccacctggattcactggagagcagaagaggctaatctttaacattcttgacccaaatcctctaagtcgtataacactagctgagataatcatcaaagattcttggttcaagataggttatacaccagtttatcatcaactttcagactcaatcaaggacaatgtcgcggagataaatgcagcaaccgcgtcatcaaatttcataaatgcttttcagataatagcaatgtctagtgatctagatttgtcaggtctcttcgaagaaaatgatgataagagatataaaacaagaattgggtccaagaacacagcacaagaaacaatcaagaagattgaagctgcagcaacttatgttagtttatcagttgagagaataaagcacttcaaggttaagattcagccaaaggagataagatcaagatcttcttatgacttattatcagcagaggtgatagaggtgactccaacaaattgtgttatagaaatatcgaaatccgcaggcgagttaagactatacatggagttttgccagagcttatcaagcttacttaccgcggaagtaagctaagatagagagccatagattctcaagtaaaaatgttaaaacagaggaagcaaatgaagcatatttttgcagattgaagttgaagtgtaaagaagacaatgaagagaagaaatccaaagaatttagttatgtcttggatcttggtgatcccaaagggttcttattcaggatgtaaaatgatagattggtttctaatcaaactcgtttataaaatagatatataaaaagctgaacaagttctatttc

SEQ ID NO: 33253 - protein, 435 aa, Arabidopsis thaliana
  misc_feature (1)..(435): Ceres Seq. ID no. 13602572
IRTLQDFLLSISLFLSVSEMGLFGTKKIGKYEIGRTIGEGNFAKVKLGYDTTNGTYVAVKIIDKALVIQKGLESQVKREIRTMKLLNHPNIVQIHEVIGTKTKICIVMEYVSGGQLSDRLGRQKMKESDARKLFQQLIDAVDYCHNRGVYHRDLKPQNLLLDSKGNLKVSDFGLSAVPKSGDMLSTACGSPCYIAPELIMNKGYSGAAVDVWSCGVILFELLAGYPPFDDHTLPVLYKKILRADYTFPPGFTGEQKRLIFNILDPNPLSRITLAEIIIKDSWFKIGYTPVYHQLSDSIKDNVAEINAATASSNFINAFQIIAMSSDLDLSGLFEENDDKRYKTRIGSKNTAQETIKKIEAAATYVSLSVERIKHFKVKIQPKEIRSRSSYDLLSAEVIEVTPTNCVIEISKSAGELRLYMEFCQSLSSLLTAEVS

SEQ ID NO: 33254 - protein, 416 aa, Arabidopsis thaliana
  misc_feature (1)..(416): Ceres Seq. ID no. 13602573
MGLFGTKKIGKYEIGRTIGEGNFAKVKLGYDTTNGTYVAVKIIDKALVIQKGLESQVKREIRTMKLLNHPNIVQIHEVIGTKTKICIVMEYVSGGQLSDRLGRQKMKESDARKLFQQLIDAVDYCHNRGVYHRDLKPQNLLLDSKGNLKVSDFGLSAVPKSGDMLSTACGSPCYIAPELIMNKGYSGAAVDVWSCGVILFELLAGYPPFDDHTLPVLYKKILRADYTFPPGFTGEQKRLIFNILDPNPLSRITLAEIIIKDSWFKIGYTPVYHQLSDSIKDNVAEINAATASSNFINAFQIIAMSSDLDLSGLFEENDDKRYKTRIGSKNTAQETIKKIEAAATYVSLSVERIKHFKVKIQPKEIRSRSSYDLLSAEVIEVTPTNCVIEISKSAGELRLYMEFCQSLSSLLTAEVS

SEQ ID NO: 33255 - protein, 353 aa, Arabidopsis thaliana
  misc_feature (1)..(353): Ceres Seq. ID no. 13602574
MKLLNHPNIVQIHEVIGTKTKICIVMEYVSGGQLSDRLGRQKMKESDARKLFQQLIDAVDYCHNRGVYHRDLKPQNLLLDSKGNLKVSDFGLSAVPKSGDMLSTACGSPCYIAPELIMNKGYSGAAVDVWSCGVILFELLAGYPPFDDHTLPVLYKKILRADYTFPPGFTGEQKRLIFNILDPNPLSRITLAEIIIKDSWFKIGYTPVYHQLSDSIKDNVAEINAATASSNFINAFQIIAMSSDLDLSGLFEENDDKRYKTRIGSKNTAQETIKKIEAAATYVSLSVERIKHFKVKIQPKEIRSRSSYDLLSAEVIEVTPTNCVIEISKSAGELRLYMEFCQSLSSLLTAEVS

SEQ ID NO: 33256 - DNA, 1382 bp, Arabidopsis thaliana
  misc_feature (1)..(1382): Ceres Seq. ID no. 13602579
aagagttccaaaaaggtggctcctttttgtttctggagatgcgttattgtgacccttctttgaaatttagggttcattttctcagatttcgagttcgttgtgtttgaatctctattgggtttactttcttattcgatttgggggaaatggctgattggtatcagcttgcacagtctataatctttggtttgatcttcgcttaccttctcgctaagctaatctctatcctcctcgcttttaaagacgagaatctctcactcactcgtaaccacacgactcaatcggagtatgagaacttgcgaaaggtcgaaactttaactgggattagcggcgagactgattctcttatagctgagcaaggtagcttgagaggtgatgaagatgaatcagatgatgatgattgggaaggtgtcgaaagtacagaacttgatgaggcatttagtgctgctacggcttttgttgctgctgctgcatcggataggctttcgcagaaagtttctaatgagttgcaacttcagctttatggattgtataaaattgctactgaaggaccttgtactgctcctcaaccatcagctcttaaaatgactgctcgtgccaagtggcaagcatggcagaaattgggtgctatgcctcctgaggaagcgatggagaagtatatcgaccttgttactcagctttacccagcttgggttgaaggtggctcgaaacgaagaaatcggagtggtgaggctgcaggccccatgggaccggtttttagctcattggtgtacgaagaggaatctgacaatgagttgaagattgacgccatacacgcctttgctagagaaggagaagtcgagaatctattgaaatgcatagaaaatggcatacccgtaaatgcaagagatagtgaaggtcgaacaccactgcattgggctatagaccgtggccatcttaacgttgctgaagctctggttgataagaacgcagatgtgaatgctaaagacaatgaaggccaaacctctctacactatgctgttgtgtgcgaaagagaagcactcgccgagtttctggtgaagcagaaagctgatacaaccattaaagacgaagacggaaactcgcctcttgatctctgtgaatcagaatggtcttggatgcgagagaagaaggattccaattagtgttttttaagtctttaaaattgtgtgtcaaagctagatgcttgtgtttttcttacatttcctctgagcctctttgcttcctcttaagcttatgttttaacatacaacaacacaagttacatatgatatagtagctctagtttttattggttactatattgaacccagagagatcatcatcatcaatcatcataactcaataatagttttttttttgtt

SEQ ID NO: 33257 - protein, 338 aa, Arabidopsis thaliana
  misc_feature (1)..(338): Ceres Seq. ID no. 13602580
MADWYQLAQSIIFGLIFAYLLAKLISILLAFKDENLSLTRNHTTQSEYENLRKVETLTGISGETDSLIAEQGSLRGDEDESDDDDWEGVESTELDEAFSAATAFVAAAASDRLSQKVSNELQLQLYGLYKIATEGPCTAPQPSALKMTARAKWQAWQKLGAMPPEEAMEKYIDLVTQLYPAWVEGGSKRRNRSGEAAGPMGPVFSSLVYEEESDNELKIDAIHAFAREGEVENLLKCIENGIPVNARDSEGRTPLHWAIDRGHLNVAEALVDKNADVNAKDNEGQTSLHYAVVCEREALAEFLVKQKADTTIKDEDGNSPLDLCESEWSWMREKKDSN

SEQ ID NO: 33258 - protein, 192 aa, Arabidopsis thaliana
  misc_feature (1)..(192): Ceres Seq. ID no. 13602581
MTARAKWQAWQKLGAMPPEEAMEKYIDLVTQLYPAWVEGGSKRRNRSGEAAGPMGPVFSSLVYEEESDNELKIDAIHAFAREGEVENLLKCIENGIPVNARDSEGRTPLHWAIDRGHLNVAEALVDKNADVNAKDNEGQTSLHYAVVCEREALAEFLVKQKADTTIKDEDGNSPLDLCESEWSWMREKKDSN

SEQ ID NO: 33259 - protein, 177 aa, Arabidopsis thaliana
  misc_feature (1)..(177): Ceres Seq. ID no. 13602582
MPPEEAMEKYIDLVTQLYPAWVEGGSKRRNRSGEAAGPMGPVFSSLVYEEESDNELKIDAIHAFAREGEVENLLKCIENGIPVNARDSEGRTPLHWAIDRGHLNVAEALVDKNADVNAKDNEGQTSLHYAVVCEREALAEFLVKQKADTTIKDEDGNSPLDLCESEWSWMREKKDSN

SEQ ID NO: 33260 - DNA, 1495 bp, Arabidopsis thaliana
  misc_feature (1)..(1495): Ceres Seq. ID no. 13602587
aatgccaccaactgttcttttcctgtaatttccagtttagagctttcttcttcctttccctatcctcaaccccaaacgaacgctcttcaagaattagggtttcgttttgaatcttctctgattcccaaatccaaagatatgaagagatcttcagggagaaaggattcaaatttcatagaacaattgatactttacgtcgctagtgctgcattgagtagcttggttctctacgttggtctccgtcaacttgacccgaaccgtgacgccgctaaaaagtctctcgagcacaaaagagaaatcgccaaacgtttgggtcgtcctcttattcaaaccaatcaatacgaggatgtgattgcgtgtgatgtaataaacccattacacatagatgttgaatttggttctattggaggattggagtcaattaagcaagctttgtatgagcttgtgattctaccattgaaaagacctgagctttttgcttatgggaagttactgggtcctcaaaagggtgttttgttgtatggtcctcctggaactgggaagactatgcttgctaaagcgattgcgagagagtctgaagctgtttttattaatgtaaaggtttctaatttgatgagcaagtggtttggtgatgcacagaagcttgtgtctgctgtgtttagcttggcgtataaactccaacctgctattatttttatcgatgaggtggatagctttcttggccagcgacggtcgactgataatgaagcaatgtcgaatatgaagaccgagtttatggctttatgggatggatttactacagaccagaatgcgagggtgatggttcttgctgcaactaacagaccatcagagctcgatgaagcgatattgaggcgttttcctcagtcatttgagatcgggatgcctgattgccaggagagagcgcaaatattgaaagttgttttgaaaggagagagtgttgaatcagatattaactatgatcgtatagctcgtttatgtgaggactataccggatcagatatttttgaactctgcaaaaaagcagcttacttcccaatccgagaaatcctagaggcagagaaagagggcaaacgagtttctgttcctagaccattgacacaactggacttggagaaggttcttgctacctcaaagaagacacaagttgctgcaagcgagtacactggtttaagctctcaatcttctgtctggggaagtccaagcaatgccgatgaggtccaagcagctataaacggcatctccaagctttttgtctcgcagcttagaaacattcagccagattctcaggattcatatcaacaacatccttcagaaggagattcggaatagaagcaaactcttcactagagcttcgtatagtccaaaaagagtacaacccaagaatatacactttttgtaaacctcatatttctctgaataagttggagcattgttgccgtaagatgtttttagaaaatttaattcatgtctcgtt

SEQ ID NO: 33261 - protein, 449 aa, Arabidopsis thaliana
  misc_feature (1)..(449): Ceres Seq. ID no. 13602588
NATNCSFPVISSLELSSSFPYPQPQTNALQELGFRFESSLIPKSKDMKRSSGRKDSNFIEQLILYVASAALSSLVLYVGLRQLDPNRDAAKKSLEHKREIAKRLGRPLIQTNQYEDVIACDVINPLHIDVEFGSIGGLESIKQALYELVILPLKRPELFAYGKLLGPQKGVLLYGPPGTGKTMLAKAIARESEAVFINVKVSNLMSKWFGDAQKLVSAVFSLAYKLQPAIIFIDEVDSFLGQRRSTDNEAMSNMKTEFMALWDGFTTDQNARVMVLAATNRPSELDEAILRRFPQSFEIGMPDCQERAQILKVVLKGESVESDINYDRIARLCEDYTGSDIFELCKKAAYFPIREILEAEKEGKRVSVPRPLTQLDLEKVLATSKKTQVAASEYTGLSSQSSVWGSPSNADEVQAAINGISKLFVSQLRNIQPDSQDSYQQHPSEGDSE

SEQ ID NO: 33262 - protein, 403 aa, Arabidopsis thaliana
  misc_feature (1)..(403): Ceres Seq. ID no. 13602589
MKRSSGRKDSNFIEQLILYVASAALSSLVLYVGLRQLDPNRDAAKKSLEHKREIAKRLGRPLIQTNQYEDVIACDVINPLHIDVEFGSIGGLESIKQALYELVILPLKRPELFAYGKLLGPQKGVLLYGPPGTGKTMLAKAIARESEAVFINVKVSNLMSKWFGDAQKLVSAVFSLAYKLQPAIIFIDEVDSFLGQRRSTDNEAMSNMKTEFMALWDGFTTDQNARVMVLAATNRPSELDEAILRRFPQSFEIGMPDCQERAQILKVVLKGESVESDINYDRIARLCEDYTGSDIFELCKKAAYFPIREILEAEKEGKRVSVPRPLTQLDLEKVLATSKKTQVAASEYTGLSSQSSVWGSPSNADEVQAAINGISKLFVSQLRNIQPDSQDSYQQHPSEGDSE

SEQ ID NO: 33263 - protein, 267 aa, Arabidopsis thaliana
  misc_feature (1)..(267): Ceres Seq. ID no. 13602590
MLAKAIARESEAVFINVKVSNLMSKWFGDAQKLVSAVFSLAYKLQPAIIFIDEVDSFLGQRRSTDNEAMSNMKTEFMALWDGFTTDQNARVMVLAATNRPSELDEAILRRFPQSFEIGMPDCQERAQILKVVLKGESVESDINYDRIARLCEDYTGSDIFELCKKAAYFPIREILEAEKEGKRVSVPRPLTQLDLEKVLATSKKTQVAASEYTGLSSQSSVWGSPSNADEVQAAINGISKLFVSQLRNIQPDSQDSYQQHPSEGDSE

SEQ ID NO: 33264 - DNA, 1371 bp, Arabidopsis thaliana
  misc_feature (1)..(1371): Ceres Seq. ID no. 13602599
ataaaatggcacaaagtatgaaagttgaaacctatcctcatatttagcatcactcctctaatattattttttcaaacaagaacaatggcaaaccatctccaagtccccttaaccaaaccggatcgagttaaagaagaacaagaggttgaagaagaggcaagattgctagcgagaaggctcgcgaatgcagccgcatcacctatggttctcaaagccgccttggagctcggcgtgatcgacaccatcaccacagtaggaggtggcgatttgtggctctcaccttctgaaatagcactaagactcccaaccaaaccatgcaacctggaagctccggctttgctagaccgtatgcttcgatttctcgtcagccattcggtcttaaaatgccgtactgtaatagaagagaacggtcaaaccggaaaagttgagagggtatatgcagctgaaccggtctgcaaatatctcttgaacaaaagtgacgacgtctcgggttcttttgcatcgctctttatgcttgacctcagcgacgtatttatcaagacatggacacatctcgaagatgtgatattagaaggaagagatgcatttagttctgcccatgggatgaaactattcgaatacatccaagccgatgagcgatttggtaaagtgtttaaccgggctatgttggaatcttccaccatggttacggagaaggttcttaaattttatgaaggattcaaagatgtgaagactttggtggatgtagggggaggacttggcaacacactaggtctcatcacttccaagtatcctcatcttattggtatcaatttcgatttagctccggtgttagccaatgctcattcttatcccggtgtgaaccatgtggctggtgatatgttcatcaagattccaaagggggatgccattttcatgaagtggatactacatgattggacggacgaacaatgcgtagcaattcttaaaaactgttggaaaagtctcgaagaaaatggaaaactgataatagtggaaatggttacaccggtggaagcaaagagcggagatatatgttctaacattgtgtttggtatggacatgacaatgttaacacaatgttcaggtggtaaagagagagatctctatgagtttgaaaatttagcatatgcatcgggtttttctcgttgtgcaatcgtatgcgctgtttatccattttccgtcatcgaaatctacaaatagattcattcaacatatgccattttacgatatttacacaacccgtttcttcttctatttgggatgtaatgtttgtgattatcatttgtgtgtggtcgatcttttgtaatattttcgtgtgatgttcttaccgttgtaatgatatatgtgtct

SEQ ID NO: 33265 - protein, 378 aa, Arabidopsis thaliana
  misc_feature (1)..(378): Ceres Seq. ID no. 13602600
MANHLQVPLTKPDRVKEEQEVEEEARLLARRLANAAASPMVLKAALELGVIDTITTVGGGDLWLSPSEIALRLPTKPCNLEAPALLDRMLRFLVSHSVLKCRTVIEENGQTGKVERVYAAEPVCKYLLNKSDDVSGSFASLFMLDLSDVFIKTWTHLEDVILEGRDAFSSAHGMKLFEYIQADERFGKVFNRAMLESSTMVTEKVLKFYEGFKDVKTLVDVGGGLGNTLGLITSKYPHLIGINFDLAPVLANAHSYPGVNHVAGDMFIKIPKGDAIFMKWILHDWTDEQCVAILKNCWKSLEENGKLIIVEMVTPVEAKSGDICSNIVFGMDMTMLTQCSGGKERDLYEFENLAYASGFSRCAIVCAVYPFSVIEIYK

SEQ ID NO: 33266 - protein, 339 aa, Arabidopsis thaliana
  misc_feature (1)..(339): Ceres Seq. ID no. 13602601
MVLKAALELGVIDTITTVGGGDLWLSPSEIALRLPTKPCNLEAPALLDRMLRFLVSHSVLKCRTVIEENGQTGKVERVYAAEPVCKYLLNKSDDVSGSFASLFMLDLSDVFIKTWTHLEDVILEGRDAFSSAHGMKLFEYIQADERFGKVFNRAMLESSTMVTEKVLKFYEGFKDVKTLVDVGGGLGNTLGLITSKYPHLIGINFDLAPVLANAHSYPGVNHVAGDMFIKIPKGDAIFMKWILHDWTDEQCVAILKNCWKSLEENGKLIIVEMVTPVEAKSGDICSNIVFGMDMTMLTQCSGGKERDLYEFENLAYASGFSRCAIVCAVYPFSVIEIYK

SEQ ID NO: 33267 - protein, 290 aa, Arabidopsis thaliana
  misc_feature (1)..(290): Ceres Seq. ID no. 13602602
MLRFLVSHSVLKCRTVIEENGQTGKVERVYAAEPVCKYLLNKSDDVSGSFASLFMLDLSDVFIKTWTHLEDVILEGRDAFSSAHGMKLFEYIQADERFGKVFNRAMLESSTMVTEKVLKFYEGFKDVKTLVDVGGGLGNTLGLITSKYPHLIGINFDLAPVLANAHSYPGVNHVAGDMFIKIPKGDAIFMKWILHDWTDEQCVAILKNCWKSLEENGKLIIVEMVTPVEAKSGDICSNIVFGMDMTMLTQCSGGKERDLYEFENLAYASGFSRCAIVCAVYPFSVIEIYK

SEQ ID NO: 33268 - DNA, 1540 bp, Arabidopsis thaliana
  misc_feature (1)..(1540): Ceres Seq. ID no. 13602619
atcctctgcaaagttatggctttgcttgagagtataatattagggctaatcacaggatggttagcttttgttattgggttggttattggatgggcatggaaaccaagatgggtttcttcttctaataatcgacaagtcaaattacaatgttctgctccaagatcttttgatttgtctttaccatcttcttctcctagttctgttgttacttctcctttgaagggttttggatcagctccttgcttaaaggctcttgtttgtgatacatggactatggctttaagacaacagagacaaacagtttctcctgattcttcttcttcttcatatgattcttctgaacaacatttggatttggtttcaagagtgaagaaaacaaaggagagattgcctaatactgtaacagagttagatttgagacatcttgtgcaattggttgagaggaaagatggtggtcaagcttggattcagatgatggatcgttttactcctggtatgagataccaagcttggttgagagaacctaagaatggtcctactgagtatagaagtagaactgtgtttgaagatgcaactcctgtgatgttaagagactttttctgggatgatgagtttagaccaacttgggatacaatgctttctaattccactactgttgaagagtgtcccagtactggaaccatgattgttagatggatacgcaagttcccgttcttctgcagtgatagagagtatgtaatcggtcgcaggatatggaattgtggaaactcttattactgtgttacaaagggagtatcggttccttctataccgcctaacaacaaacaaaaacgcgtggatttgttctactcaagctggtgcattcgaccagtggaatcaagaagagacgatggggtaacaagtgcctgcgaagtacttctattccaccacgaagacatgggaatacctagagaaatcgcaaagcttggagtgaaacgaggaatgtggggagcagtgaagaagatggaacccggtttacgtgcttaccaaacgcatagactctcagatggaggaaccaagctttctcggtctgctttcatggctcaaatcaacaccaagatcacacaagaccatctcatctccctcagcaacggtgcatcgcctgtcactgaaactcccgttacattaaaccaaggaaaccgagctgcgaatctgaagaaactgttgattatcggtggagctgttgcggttgtctgcagtttaagcggaggtgcttttgttcctcctgcgtttcttttaggttttgggaaaaggtttgttaatggtggaagaaaacgtcagctcgaaggaacaacaagaagtgagagtcagactacttcttcatagaatcttgagaccaagaatatagatcaacatataaatttagattcgttttaagtagattaagaataatccattccaaaattagtttatagaattggaataagctgtatgattattaatctttatacaaaggaaggaacattttttttacaagtaatgaataaaatctctttatcat

SEQ ID NO: 33269 - protein, 454 aa, Arabidopsis thaliana
  misc_feature (1)..(454): Ceres Seq. ID no. 13602620
ILCKVMALLESIILGLITGWLAFVIGLVIGWAWKPRWVSSSNNRQVKLQCSAPRSFDLSLPSSSPSSVVTSPLKGFGSAPCLKALVCDTWTMALRQQRQTVSPDSSSSSYDSSEQHLDLVSRVKKTKERLPNTVTELDLRHLVQLVERKDGGQAWIQMMDRFTPGMRYQAWLREPKNGPTEYRSRTVFEDATPVMLRDFFWDDEFRPTWDTMLSNSTTVEECPSTGTMIVRWIRKFPFFCSDREYVIGRRIWNCGNSYYCVTKGVSVPSIPPNNKQKRVDLFYSSWCIRPVESRRDDGVTSACEVLLFHHEDMGIPREIAKLGVKRGMWGAVKKMEPGLRAYQTHRLSDGGTKLSRSAFMAQINTKITQDHLISLSNGASPVTETPVTLNQGNRAANLKKLLIIGGAVAVVCSLSGGAFVPPAFLLGFGKRFVNGGRKRQLEGTTRSESQTTSS

SEQ ID NO: 33270 - protein, 449 aa, Arabidopsis thaliana
  misc_feature (1)..(449): Ceres Seq. ID no. 13602621
MALLESIILGLITGWLAFVIGLVIGWAWKPRWVSSSNNRQVKLQCSAPRSFDLSLPSSSPSSVVTSPLKGFGSAPCLKALVCDTWTMALRQQRQTVSPDSSSSSYDSSEQHLDLVSRVKKTKERLPNTVTELDLRHLVQLVERKDGGQAWIQMMDRFTPGMRYQAWLREPKNGPTEYRSRTVFEDATPVMLRDFFWDDEFRPTWDTMLSNSTTVEECPSTGTMIVRWIRKFPFFCSDREYVIGRRIWNCGNSYYCVTKGVSVPSIPPNNKQKRVDLFYSSWCIRPVESRRDDGVTSACEVLLFHHEDMGIPREIAKLGVKRGMWGAVKKMEPGLRAYQTHRLSDGGTKLSRSAFMAQINTKITQDHLISLSNGASPVTETPVTLNQGNRAANLKKLLIIGGAVAVVCSLSGGAFVPPAFLLGFGKRFVNGGRKRQLEGTTRSESQTTSS

SEQ ID NO: 33271 - protein, 363 aa, Arabidopsis thaliana
  misc_feature (1)..(363): Ceres Seq. ID no. 13602622
MALRQQRQTVSPDSSSSSYDSSEQHLDLVSRVKKTKERLPNTVTELDLRHLVQLVERKDGGQAWIQMMDRFTPGMRYQAWLREPKNGPTEYRSRTVFEDATPVMLRDFFWDDEFRPTWDTMLSNSTTVEECPSTGTMIVRWIRKFPFFCSDREYVIGRRIWNCGNSYYCVTKGVSVPSIPPNNKQKRVDLFYSSWCIRPVESRRDDGVTSACEVLLFHHEDMGIPREIAKLGVKRGMWGAVKKMEPGLRAYQTHRLSDGGTKLSRSAFMAQINTKITQDHLISLSNGASPVTETPVTLNQGNRAANLKKLLIIGGAVAVVCSLSGGAFVPPAFLLGFGKRFVNGGRKRQLEGTTRSESQTTSS

SEQ ID NO: 33272 - DNA, 3781 bp, Arabidopsis thaliana
  misc_feature (1)..(3781): Ceres Seq. ID no. 13602626
atgttatcggcatcgccgaacacactagcgaaaagttcgttagaggagatgcttgagtctcttcgtcagaaagatgagtgtgatcggcctaaagatatgcctccggcgcttccttctcggcctaattcaagagctcgtcttccttctgctcgtcgttcgcttccggccaactttaatgtttctagtgtaatggaagatcagaacggaagtgttgtttctgtgacgcctgcggtggaagctgaatcggaaaggaaagaggaaggggtgaagaggaaagagaaggatttgggtgttaagaggaatagttttggaagcaagaaaatgaggactggtcttaggtcagagtctccgtatgcagcagagaaggaagaggagggtgtgaagattagtatcgctaaagttagtttggtggagaacacggaggagcataataagcctgagtctgagtggaacaataacgttgagtacttcatcaagaagaaacttcgagtttggtgtcgggtatctaatgggcagtggcaactggggaagatacagtctacttccgctgatacgtcgcttgttatgttgtccactgcaaatgttgtgaaagtgtctactgaagagctttttcctgcaaacccagatatattggaaggtgttgaagatcttatacagctcagttatctaaatgaaccatctgttctttataaccttcgtgtcagatatttgcaagacgtgatttatagtaaagcaggacctgtattgattgcggtcaatccattcaagaatgtagaaatttatggaaatgatgttatctcagcttatcagaagaaggttatggatgctccacatgtctatgctgtggcggatgcagcttatgatgagatgatgagagagaagaatcagtctcttataataagtggagaaagtggagctgggaaaactgagactgcaaaatttgcaatgcagtacttggcagctctcggtggaggtagctgtggagtagagtatgaaatcctaaaaacaacctgcatactcgaagcttttggaaacgctaaaacatcaagaaatgctaactctagccgatttggtaaactcatagaaattcattttagtgcaatgggaaagatatgtggagccaaacttgaaacttttctgctagagaagtcaagagtggttcagctgttcaatggcgaaagatcctatcatatattttatgagctgtgtgcaggtgcttcaccgattcttaaagagagattgaagcttaaaacagcaagtgagtatacctacctgagccagagtgattgcttgaccattgccggtgttgatgatgctcagaaatttcacaaactactggaagcttttgacattgttcaaatccctaaagagcatcaagagagggcatttgcattgcttgcagcagtgttgtggctaggaaatgtatcttttcgagttactgacaacgaaaatcatgtggaggtggtagcggatgaagctgtcgccaatgccgctatgttaatgggctgcaacacagaagagcttatggtggttttgtccacccgtaaacttcaagctggtacggattgtattgctaaaaaactgacattgcggcaggcaactgacatgagggatggaatagcaaaatttatttatgcaaacctatttgactggcttgttgagcaaataaacattgcattggaagtcggtaaatcacgtacaggaagatctataagcatccttgatatatatgggtttgaatcatttaagaataacagctttgaacaattctgtataaactacgcaaatgaaagattgcagcaacacttcaaccggcatttatttaaacttgaacaagaggaatatgaagaagatggaattgattggactaaggtcgaatttgtagacaatcaagagtgcttagatctaattgagaagaaaccaattggtttgttgtctctactagacgaggaatcaaattttccaaaagcaactgatttgacctttgccaacaagctcaagcaacatttgaagaccaactcttgcttcaaaggagagagaggtcgagccttcagagttaatcattatgctggagaggttctctatgatacaaatggctttttggagaagaacagggatccgttacctgctgatcttatcaatcttttatcatcatgcgactgccagttgctgaaattgttttcaactaaaatgcgtggcaaatcgcaaaagccacttatgttatcggactccacgaaccaaactgttggaacaaagttcaagggtcaacttttcaaattgatgaacaagttagagaacacaagtcctcacttcattcgatgcataaagccgaattcaaagcagcttcccagagtttatgaagaggatcttgtcttacaacagcttagatgttgtggcgtgttggaagttgttagaatatcaagatctggatatcctactcgtttgacacatcaagagtttgcaggaagatatggtttcttattgtcagacaaaaaggtcgctcaggatcctctgagcgtatcaattgctgttctgaaacaatatgacgttcatcctgaaatgtatcaagtgggttacacaaaattgtacctccgaactggacaaattgggatctttgaggatcggaggaaaaaggttcttcaaggcatagtgggcttacaaaagcatttccgtggtcacttgtctcgtgcatacttccaaaatatgcggaaagtaacattggttcttcagtcatatatacgaggtgaaaatgcccgaagattgtttgacactgaagcaaaattccatgcggattctgtttctgaagcaagcacagatgagttgagtgcagtcatacacttgcaatctgcggttcgtggatggttggctcgcaaacatttcaatagtatgcaaagacaaaaagaactacgcaatgtggcgacaaaatcaaagaggaaagctggcaggaggatttcagaagacaaggatattcctctggagcagccacaagttcaaccaacatctatgtctgatctccagaaacggattttgaaatctgaagcagctttatcgcagaaggaagaagaaaacacagctttgagagagcagttgaggcaatttgaggagagatggtcagagtatgatataaagatgaagtcaatggaggaaacatggcaaaagcaaatgtcatcattgcagatgagtcttgccgccgctagaaagagtctagctgcagagagcattacgggtcaagcaggaggaagacaagacacatcgatatcacctttcggttatgactcagaggacacgatgtctactggaactccgggagtaagaactcctactaataagttcacaaacggaaacactcctgaactcagaatcagagagctcaacggaagtttgaatgcggttaatcatcttgcaagagagtttgaccaaaggagactcaatttcgatgaagatgcaagagctattgtggaggtgaagctcggacctcaggcaactccaaacgggcagcaacagcaacatccagaagatgaatttaggagactgaagctaagatttgagacatggaagaaagattacaaagctagattaagagatactaaagcaagactccatagagtagatggtgataaaggtcgtcaccggaaatggtggggaaaaagaggctaggggtcttattacttattagtgtgtgtggaatcttcatccacttagctttgtattagtatcacgatcccaaaatgttagattaagagcattgtagatttagctgtgagagacatgtatttttgag

SEQ ID NO: 33273 - protein, 1218 aa, Arabidopsis thaliana
  misc_feature (1)..(1218): Ceres Seq. ID no. 13602627
MLSASPNTLAKSSLEEMLESLRQKDECDRPKDMPPALPSRPNSRARLPSARRSLPANFNVSSVMEDQNGSVVSVTPAVEAESERKEEGVKRKEKDLGVKRNSFGSKKMRTGLRSESPYAAEKEEEGVKISIAKVSLVENTEEHNKPESEWNNNVEYFIKKKLRVWCRVSNGQWQLGKIQSTSADTSLVMLSTANVVKVSTEELFPANPDILEGVEDLIQLSYLNEPSVLYNLRVRYLQDVIYSKAGPVLIAVNPFKNVEIYGNDVISAYQKKVMDAPHVYAVADAAYDEMMREKNQSLIISGESGAGKTETAKFAMQYLAALGGGSCGVEYEILKTTCILEAFGNAKTSRNANSSRFGKLIEIHFSAMGKICGAKLETFLLEKSRVVQLFNGERSYHIFYELCAGASPILKERLKLKTASEYTYLSQSDCLTIAGVDDAQKFHKLLEAFDIVQIPKEHQERAFALLAAVLWLGNVSFRVTDNENHVEVVADEAVANAAMLMGCNTEELMVVLSTRKLQAGTDCIAKKLTLRQATDMRDGIAKFIYANLFDWLVEQINIALEVGKSRTGRSISILDIYGFESFKNNSFEQFCINYANERLQQHFNRHLFKLEQEEYEEDGIDWTKVEFVDNQECLDLIEKKPIGLLSLLDEESNFPKATDLTFANKLKQHLKTNSCFKGERGRAFRVNHYAGEVLYDTNGFLEKNRDPLPADLINLLSSCDCQLLKLFSTKMRGKSQKPLMLSDSTNQTVGTKFKGQLFKLMNKLENTSPHFIRCIKPNSKQLPRVYEEDLVLQQLRCCGVLEVVRISRSGYPTRLTHQEFAGRYGFLLSDKKVAQDPLSVSIAVLKQYDVHPEMYQVGYTKLYLRTGQIGIFEDRRKKVLQGIVGLQKHFRGHLSRAYFQNMRKVTLVLQSYIRGENARRLFDTEAKFHADSVSEASTDELSAVIHLQSAVRGWLARKHFNSMQRQKELRNVATKSKRKAGRRISEDKDIPLEQPQVQPTSMSDLQKRILKSEAALSQKEEENTALREQLRQFEERWSEYDIKMKSMEETWQKQMSSLQMSLAAARKSLAAESITGQAGGRQDTSISPFGYDSEDTMSTGTPGVRTPTNKFTNGNTPELRIRELNGSLNAVNHLAREFDQRRLNFDEDARAIVEVKLGPQATPNGQQQQHPEDEFRRLKLRFETWKKDYKARLRDTKARLHRVDGDKGRHRKWWGKRG

SEQ ID NO: 33274 - protein, 1202 aa, Arabidopsis thaliana
  misc_feature (1)..(1202): Ceres Seq. ID no. 13602628
MLESLRQKDECDRPKDMPPALPSRPNSRARLPSARRSLPANFNVSSVMEDQNGSVVSVTPAVEAESERKEEGVKRKEKDLGVKRNSFGSKKMRTGLRSESPYAAEKEEEGVKISIAKVSLVENTEEHNKPESEWNNNVEYFIKKKLRVWCRVSNGQWQLGKIQSTSADTSLVMLSTANVVKVSTEELFPANPDILEGVEDLIQLSYLNEPSVLYNLRVRYLQDVIYSKAGPVLIAVNPFKNVEIYGNDVISAYQKKVMDAPHVYAVADAAYDEMMREKNQSLIISGESGAGKTETAKFAMQYLAALGGGSCGVEYEILKTTCILEAFGNAKTSRNANSSRFGKLIEIHFSAMGKICGAKLETFLLEKSRVVQLFNGERSYHIFYELCAGASPILKERLKLKTASEYTYLSQSDCLTIAGVDDAQKFHKLLEAFDIVQIPKEHQERAFALLAAVLWLGNVSFRVTDNENHVEVVADEAVANAAMLMGCNTEELMVVLSTRKLQAGTDCIAKKLTLRQATDMRDGIAKFIYANLFDWLVEQINIALEVGKSRTGRSISILDIYGFESFKNNSFEQFCINYANERLQQHFNRHLFKLEQEEYEEDGIDWTKVEFVDNQECLDLIEKKPIGLLSLLDEESNFPKATDLTFANKLKQHLKTNSCFKGERGRAFRVNHYAGEVLYDTNGFLEKNRDPLPADLINLLSSCDCQLLKLFSTKMRGKSQKPLMLSDSTNQTVGTKFKGQLFKLMNKLENTSPHFIRCIKPNSKQLPRVYEEDLVLQQLRCCGVLEVVRISRSGYPTRLTHQEFAGRYGFLLSDKKVAQDPLSVSIAVLKQYDVHPEMYQVGYTKLYLRTGQIGIFEDRRKKVLQGIVGLQKHFRGHLSRAYFQNMRKVTLVLQSYIRGENARRLFDTEAKFHADSVSEASTDELSAVIHLQSAVRGWLARKHFNSMQRQKELRNVATKSKRKAGRRISEDKDIPLEQPQVQPTSMSDLQKRILKSEAALSQKEEENTALREQLRQFEERWSEYDIKMKSMEETWQKQMSSLQMSLAAARKSLAAESITGQAGGRQDTSISPFGYDSEDTMSTGTPGVRTPTNKFTNGNTPELRIRELNGSLNAVNHLAREFDQRRLNFDEDARAIVEVKLGPQATPNGQQQQHPEDEFRRLKLRFETWKKDYKARLRDTKARLHRVDGDKGRHRKWWGKRG

SEQ ID NO: 33275 - protein, 1186 aa, Arabidopsis thaliana
  misc_feature (1)..(1186): Ceres Seq. ID no. 13602629
MPPALPSRPNSRARLPSARRSLPANFNVSSVMEDQNGSVVSVTPAVEAESERKEEGVKRKEKDLGVKRNSFGSKKMRTGLRSESPYAAEKEEEGVKISIAKVSLVENTEEHNKPESEWNNNVEYFIKKKLRVWCRVSNGQWQLGKIQSTSADTSLVMLSTANVVKVSTEELFPANPDILEGVEDLIQLSYLNEPSVLYNLRVRYLQDVIYSKAGPVLIAVNPFKNVEIYGNDVISAYQKKVMDAPHVYAVADAAYDEMMREKNQSLIISGESGAGKTETAKFAMQYLAALGGGSCGVEYEILKTTCILEAFGNAKTSRNANSSRFGKLIEIHFSAMGKICGAKLETFLLEKSRVVQLFNGERSYHIFYELCAGASPILKERLKLKTASEYTYLSQSDCLTIAGVDDAQKFHKLLEAFDIVQIPKEHQERAFALLAAVLWLGNVSFRVTDNENHVEVVADEAVANAAMLMGCNTEELMVVLSTRKLQAGTDCIAKKLTLRQATDMRDGIAKFIYANLFDWLVEQINIALEVGKSRTGRSISILDIYGFESFKNNSFEQFCINYANERLQQHFNRHLFKLEQEEYEEDGIDWTKVEFVDNQECLDLIEKKPIGLLSLLDEESNFPKATDLTFANKLKQHLKTNSCFKGERGRAFRVNHYAGEVLYDTNGFLEKNRDPLPADLINLLSSCDCQLLKLFSTKMRGKSQKPLMLSDSTNQTVGTKFKGQLFKLMNKLENTSPHFIRCIKPNSKQLPRVYEEDLVLQQLRCCGVLEVVRISRSGYPTRLTHQEFAGRYGFLLSDKKVAQDPLSVSIAVLKQYDVHPEMYQVGYTKLYLRTGQIGIFEDRRKKVLQGIVGLQKHFRGHLSRAYFQNMRKVTLVLQSYIRGENARRLFDTEAKFHADSVSEASTDELSAVIHLQSAVRGWLARKHFNSMQRQKELRNVATKSKRKAGRRISEDKDIPLEQPQVQPTSMSDLQKRILKSEAALSQKEEENTALREQLRQFEERWSEYDIKMKSMEETWQKQMSSLQMSLAAARKSLAAESITGQAGGRQDTSISPFGYDSEDTMSTGTPGVRTPTNKFTNGNTPELRIRELNGSLNAVNHLAREFDQRRLNFDEDARAIVEVKLGPQATPNGQQQQHPEDEFRRLKLRFETWKKDYKARLRDTKARLHRVDGDKGRHRKWWGKRG

SEQ ID NO: 33276 - DNA, 1250 bp, Arabidopsis thaliana
  misc_feature (1)..(1250): Ceres Seq. ID no. 13602634
aaaacaaaccaactttccttctctaatcaaaacaagaaagacacaaagatggagatctcaaaaacccttttgctagtgatttctctggtggctgcaacttgtttcttgcaagccaaggcagctggagtttattgtagtaacccttacactcgatgttaccgcaagtacattaggtgtccagaggaatgtccaagcaaaaccgctatgaactccaagaacaaagtgtgctacgccgattgcgatagacccacttgcaaatcccaatgccgcatgaggaaaccaaactgcaacagacctggatcagcttgttatgacccgaggttcattggaggagacggcattgtgttctacttccatggaaagagcaatgaagagtttagcctcgtctctgactctgaccttcagatcaatggtaggttcattggtcacagacccgctggtcgtgccagagacttcacatggatccaagctctaggattccttttcaactccaacaaattctccctcgaagccgcgaaaaccgcctcatgggacaacgaaatcgaccatctcaaattcagttacgatggccaagatttatctgttccagaagaaactctctccacctggtactcaccaaacaaggacatcaagatcgagagagtgagtatgagaaacagcgtgatcgtgacaatcaaagacaaagccgagatcatgatcaatgtggttccagtgacaaaagaagacgacagaatccatagctacaaagtaccatcagatgattgttttgcacatcttgaggttcaattcagattctttaacctttcacctaaggttgatggaatcttgggacgaacctacaggcccgatttccaaaatccggctaagcctggagtcgcaatgccagttgttggtggtgaagacagcttcaagacttcttctctactctccaatgactgtaaaacttgcattttctctgagtcacaagcagagattgattctgttaagtcagagattgaatatgcaactttggattgtacccgtggagcgtcttctggttacggtatcgtgtgcaggaagtaaaaaaagaatcatataaacttggcttaaaagaagaataatgccagagagctttagcttctactggagattttccaaagtataatataagtgaaggaataatatgtaaacttgcaatgtatttgtattgtatcatccaccatgtattctaatttgtattaacctaatcattgttattgatatataatacc

SEQ ID NO: 33277 - protein, 353 aa, Arabidopsis thaliana
  misc_feature (1)..(353): Ceres Seq. ID no. 13602635
KTNQLSFSNQNKKDTKMEISKTLLLVISLVAATCFLQAKAAGVYCSNPYTRCYRKYIRCPEECPSKTAMNSKNKVCYADCDRPTCKSQCRMRKPNCNRPGSACYDPRFIGGDGIVFYFHGKSNEEFSLVSDSDLQINGRFIGHRPAGRARDFTWIQALGFLFNSNKFSLEAAKTASWDNEIDHLKFSYDGQDLSVPEETLSTWYSPNKDIKIERVSMRNSVIVTIKDKAEIMINVVPVTKEDDRIHSYKVPSDDCFAHLEVQFRFFNLSPKVDGILGRTYRPDFQNPAKPGVAMPVVGGEDSFKTSSLLSNDCKTCIFSESQAEIDSVKSEIEYATLDCTRGASSGYGIVCRK

SEQ ID NO: 33278 - protein, 337 aa, Arabidopsis thaliana
  misc_feature (1)..(337): Ceres Seq. ID no. 13602636
MEISKTLLLVISLVAATCFLQAKAAGVYCSNPYTRCYRKYIRCPEECPSKTAMNSKNKVCYADCDRPTCKSQCRMRKPNCNRPGSACYDPRFIGGDGIVFYFHGKSNEEFSLVSDSDLQINGRFIGHRPAGRARDFTWIQALGFLFNSNKFSLEAAKTASWDNEIDHLKFSYDGQDLSVPEETLSTWYSPNKDIKIERVSMRNSVIVTIKDKAEIMINVVPVTKEDDRIHSYKVPSDDCFAHLEVQFRFFNLSPKVDGILGRTYRPDFQNPAKPGVAMPVVGGEDSFKTSSLLSNDCKTCIFSESQAEIDSVKSEIEYATLDCTRGASSGYGIVCRK

SEQ ID NO: 33279 - protein, 285 aa, Arabidopsis thaliana
  misc_feature (1)..(285): Ceres Seq. ID no. 13602637
MNSKNKVCYADCDRPTCKSQCRMRKPNCNRPGSACYDPRFIGGDGIVFYFHGKSNEEFSLVSDSDLQINGRFIGHRPAGRARDFTWIQALGFLFNSNKFSLEAAKTASWDNEIDHLKFSYDGQDLSVPEETLSTWYSPNKDIKIERVSMRNSVIVTIKDKAEIMINVVPVTKEDDRIHSYKVPSDDCFAHLEVQFRFFNLSPKVDGILGRTYRPDFQNPAKPGVAMPVVGGEDSFKTSSLLSNDCKTCIFSESQAEIDSVKSEIEYATLDCTRGASSGYGIVCRK

SEQ ID NO: 33280 - DNA, 1171 bp, Arabidopsis thaliana
  misc_feature (1)..(1171): Ceres Seq. ID no. 13602642
atacatttctccaaaatctccgagttctacaattgtgtgatcaatcaatcttctccgatttcaagcttctcgatcaaaagaatcatcatgggaggaggaagagctatggcgacggcggcgaaggttgctggaatcggagttggtaaaggaggattcaagggatttggatttcctccggcgactgagcagtttcgtgttaaaaccgcggcggctgcggcgtcgtctaaaccggtttcggcttcgattacatcggcggttcatccttctgttgaagaagatgggatgattatgcagagaccggtttgggatgattgggaatttgctgaagaagaaccgattcctagggttgtttttagcaaacctcctagtcttgaagaagctaaagaagctactgaagatcttaaagaagcaattaatttggtgtatatgtcatctccaaagtcgtctgctgctatggaaggatcaaatgatggtggctctgtttccaaaatgctctctggttttcaatcttctgagaacagagctgttgaatcagctgttccacaagttgctcttcaagcatttgcttttctaagtgagaacactgctgcgcagactgttgttgcttccattgcgagtgacccaaaagtatgggatgctgttatggagaataaggatctcatgaaatttcttcagaccaacaaaaccgctgtttcctctcaagttgaatctgacaatgacgaccaatctgaacgttcgagcacgactgagtgtgaagtcgtggaaactaagccaatggaactcttagagattctgcaggacatgaagctaaaagctgttcggttgatggaaaatgtatcttcctactttggtgacttgtttgggttaggatcagttacagaagatggaaaagacaagaagcagacgttgttcaatgaccctcgttctctgtttggattagctgtggttgttatcttcatggtagttttaaaacgtgcttaagatctcttgttcctgaattcgccgatatagcggaaaaacaactacgtactctgtgttatcgtttaaactctgtttcattcctttgctttgttatcgtttaaactctgttttttgtttgattggaatgatttggaaccgtcattggatcttttcataatttataaataaaaagatcctttggatgttttat

SEQ ID NO: 33281 - protein, 326 aa, Arabidopsis thaliana
  misc_feature (1)..(326): Ceres Seq. ID no. 13602643
IHFSKISEFYNCVINQSSPISSFSIKRIIMGGGRAMATAAKVAGIGVGKGGFKGFGFPPATEQFRVKTAAAAASSKPVSASITSAVHPSVEEDGMIMQRPVWDDWEFAEEEPIPRVVFSKPPSLEEAKEATEDLKEAINLVYMSSPKSSAAMEGSNDGGSVSKMLSGFQSSENRAVESAVPQVALQAFAFLSENTAAQTVVASIASDPKVWDAVMENKDLMKFLQTNKTAVSSQVESDNDDQSERSSTTECEVVETKPMELLEILQDMKLKAVRLMENVSSYFGDLFGLGSVTEDGKDKKQTLFNDPRSLFGLAVVVIFMVVLKRA

SEQ ID NO: 33282 - protein, 297 aa, Arabidopsis thaliana
  misc_feature (1)..(297): Ceres Seq. ID no. 13602644
MGGGRAMATAAKVAGIGVGKGGFKGFGFPPATEQFRVKTAAAAASSKPVSASITSAVHPSVEEDGMIMQRPVWDDWEFAEEEPIPRVVFSKPPSLEEAKEATEDLKEAINLVYMSSPKSSAAMEGSNDGGSVSKMLSGFQSSENRAVESAVPQVALQAFAFLSENTAAQTVVASIASDPKVWDAVMENKDLMKFLQTNKTAVSSQVESDNDDQSERSSTTECEVVETKPMELLEILQDMKLKAVRLMENVSSYFGDLFGLGSVTEDGKDKKQTLFNDPRSLFGLAVVVIFMVVLKRA

SEQ ID NO: 33283 - protein, 291 aa, Arabidopsis thaliana
  misc_feature (1)..(291): Ceres Seq. ID no. 13602645
MATAAKVAGIGVGKGGFKGFGFPPATEQFRVKTAAAAASSKPVSASITSAVHPSVEEDGMIMQRPVWDDWEFAEEEPIPRVVFSKPPSLEEAKEATEDLKEAINLVYMSSPKSSAAMEGSNDGGSVSKMLSGFQSSENRAVESAVPQVALQAFAFLSENTAAQTVVASIASDPKVWDAVMENKDLMKFLQTNKTAVSSQVESDNDDQSERSSTTECEVVETKPMELLEILQDMKLKAVRLMENVSSYFGDLFGLGSVTEDGKDKKQTLFNDPRSLFGLAVVVIFMVVLKRA

SEQ ID NO: 33284 - DNA, 811 bp, Arabidopsis thaliana
  misc_feature (1)..(811): Ceres Seq. ID no. 13602646
caatcgattttgtttgttctctgcttttttggtttagggttttagcttttcaaagttaaaacctttttttcccgaagaagaatcaatacgactcaaatcaatcaattgaatctatggcgatggctatgagacttccagcgatatctagagctgtgacggaagtagcttcagctccggttggtttgagacgactgttctgttcaaatgcttcaaggttctcttttttgtctccacaagctgaatcccaaacaccggctcgtcctcaggctgaacctagcaccaatctcttcgtctccgggcttagtaagcgcaccacttctgaaggactaaggactgcttttgctcagtttggagaagttgctgatgctaaggttgtcacagacagagtatcaggatattccaaagggtttggatttgttagatatgccactttagaagattctgccaaaggcatagctggaatggacgggaagtttcttgacggttgggtcatattcgcagagtatgcaagaccgagagagcaatcacagtcatatcaacctcagaacaacatgtctcgtcctccatactatggtaaccgctagagaaacagttttcttcggttcttatgaatcttttatattcatatttatgcttcattctatcctcttctatgatcgaactgtgttgtgcttcgtctcgtgttattacctttagaagattaaaaacttcaaattatattttgaaggaataatcagaaactgtcatttacaaaaccaaagtattaagtgtaatagttttttaagaggaagaggattttgcttacatggtt

SEQ ID NO: 33285 - protein, 156 aa, Arabidopsis thaliana
  misc_feature (1)..(156): Ceres Seq. ID no. 13602647
MAMAMRLPAISRAVTEVASAPVGLRRLFCSNASRFSFLSPQAESQTPARPQAEPSTNLFVSGLSKRTTSEGLRTAFAQFGEVADAKVVTDRVSGYSKGFGFVRYATLEDSAKGIAGMDGKFLDGWVIFAEYARPREQSQSYQPQNNMSRPPYYGNR

SEQ ID NO: 33286 - protein, 154 aa, Arabidopsis thaliana
  misc_feature (1)..(154): Ceres Seq. ID no. 13602648
MAMRLPAISRAVTEVASAPVGLRRLFCSNASRFSFLSPQAESQTPARPQAEPSTNLFVSGLSKRTTSEGLRTAFAQFGEVADAKVVTDRVSGYSKGFGFVRYATLEDSAKGIAGMDGKFLDGWVIFAEYARPREQSQSYQPQNNMSRPPYYGNR

SEQ ID NO: 33287 - protein, 152 aa, Arabidopsis thaliana
  misc_feature (1)..(152): Ceres Seq. ID no. 13602649
MRLPAISRAVTEVASAPVGLRRLFCSNASRFSFLSPQAESQTPARPQAEPSTNLFVSGLSKRTTSEGLRTAFAQFGEVADAKVVTDRVSGYSKGFGFVRYATLEDSAKGIAGMDGKFLDGWVIFAEYARPREQSQSYQPQNNMSRPPYYGNR

SEQ ID NO: 33288 - DNA, 766 bp, Arabidopsis thaliana
  misc_feature (1)..(766): Ceres Seq. ID no. 13602650
atcgtcatctgtggaacggataggacgaaggaaaaagaagaagagtgaaagttgcagagcgagaaaaaatggcaaccatgtctgctcttcagagctcttttacttctctttctctatctcccagctcttccttcctcggccagcgtttaatttccccgatttccctctccgtcacttctccggtcaagcccgctgagaacccatgtcttgttcttgcaaagctcaagcgttgggaacgaaaagaatgcaaaccaaacagtcttccgattctccacaaaatgcatgtcaagtttggagatacagtcaaagtaatatctggacgcgacaagggtaaaatcggagaggttactaagattttcactcacaacagtaccattgtgatcaaagatgtgaacctcaaaacaaaacacatgaagagccgagaagagggagagcctggtcaaattgtcaagatagaagcacctatccacagctcaaatgtgatgttgtattcaaaagaaaaagacgtagtaagccgggtgggtcacaaggtacttgaagatggacagaaggtaagatatctgatcaaaacaggggaactcatcgacaccattgagaagtggaagctacttaaggaggctaaggataaggaaaccacccaagttgcagttacctccgcatcttagcgtctcatttctttcttcttcagtgcacttttgatataatagacctatgcattggatggatgtattgaatcccttttaaggtaaattataatatttctgct

SEQ ID NO: 33289 - protein, 198 aa, Arabidopsis thaliana
  misc_feature (1)..(198): Ceres Seq. ID no. 13602651
MATMSALQSSFTSLSLSPSSSFLGQRLISPISLSVTSPVKPAENPCLVLAKLKRWERKECKPNSLPILHKMHVKFGDTVKVISGRDKGKIGEVTKIFTHNSTIVIKDVNLKTKHMKSREEGEPGQIVKIEAPIHSSNVMLYSKEKDVVSRVGHKVLEDGQKVRYLIKTGELIDTIEKWKLLKEAKDKETTQVAVTSAS

SEQ ID NO: 33290 - protein, 195 aa, Arabidopsis thaliana
  misc_feature (1)..(195): Ceres Seq. ID no. 13602652
MSALQSSFTSLSLSPSSSFLGQRLISPISLSVTSPVKPAENPCLVLAKLKRWERKECKPNSLPILHKMHVKFGDTVKVISGRDKGKIGEVTKIFTHNSTIVIKDVNLKTKHMKSREEGEPGQIVKIEAPIHSSNVMLYSKEKDVVSRVGHKVLEDGQKVRYLIKTGELIDTIEKWKLLKEAKDKETTQVAVTSAS

SEQ ID NO: 33291 - protein, 128 aa, Arabidopsis thaliana
  misc_feature (1)..(128): Ceres Seq. ID no. 13602653
MHVKFGDTVKVISGRDKGKIGEVTKIFTHNSTIVIKDVNLKTKHMKSREEGEPGQIVKIEAPIHSSNVMLYSKEKDVVSRVGHKVLEDGQKVRYLIKTGELIDTIEKWKLLKEAKDKETTQVAVTSAS

SEQ ID NO: 33292 - DNA, 1401 bp, Arabidopsis thaliana
  misc_feature (1)..(1401): Ceres Seq. ID no. 13602669
aaagtttaggttttggtttttttgtccgtcgtagtgatgcagcaaccaccgtcaaacgccgccggagctggacagataccatcaggacaacagcatttgtggatgatgatgcaacagcagcagcagcagcagcagatgcagttgtctgcggcgccactaggtcaacatcagtacggtattggatctcagaatccaggatccgctagcgatgttaagtcgttgtggatcggagacttgcagcaatggatggacgagaactacatcatgagcgtctttgctcagtctggcgaggctacatcagctaaagtcattcgtaataagctgacgggacaatctgaaggttatggattcattgagttcgtcagccactctgtagcagagcgggttttgcagacttacaatggtgctcccatgccgagcactgaacagacgtttaggctcaactgggctcaggctggggctggagagaaacgattccagactgaagggcctgaccataccattttcgtaggtgacttggcacctgaggtgactgactatatgctctcggacacattcaagaatgtgtatgggtctgtcaaaggggctaaagttgtgcttgacaggaccactggaaggtccaaggggtatgggtttgttaggtttgcggatgaaaatgagcagatgcgtgccatgactgaaatgaatggtcaatactgctcgacaaggcctatgcgtattggtccggctgccaataagaatgctcttccgatgcaaccagctatgtatcaaaacactcaaggagcaaatgctggagataatgatcctaataacacaacaatttttgttggaggtctggatgctaatgttacagacgatgaattaaagtcaatttttggtcaatttggtgaacttcttcatgtgaaaatacctccaggaaaacgttgtggattcgttcaatatgccaacaaggcgtctgcagagcatgcactttcggtgctgaatggaacacaattaggtggacaaagcatccgtctttcgtggggacgtagtccaaacaagcagtctgatcaagcgcaatggaacggtggtggatactatggataccctccacagccacagggcggctatggttatgcagctcaaccaccaactcaagaccctaatgcgtactatggtggttacactggctatggcaactatcagcagcaacgtcagtgaaacatcaacatcagctatttctaccaatgtcttggaacaaaagatgagcgattgtgtcttattaggacttctagattaaaagtgctctctttttgtttgagttttattttgcaaatgagtcgatcttgaatttgctatgaacaaagtgtttactgaatgttgaaactttattctgttgttttttaaaataaatatttatcc

SEQ ID NO: 33293 - protein, 387 aa, Arabidopsis thaliana
  misc_feature (1)..(387): Ceres Seq. ID no. 13602670
MQQPPSNAAGAGQIPSGQQHLWMMMQQQQQQQQMQLSAAPLGQHQYGIGSQNPGSASDVKSLWIGDLQQWMDENYIMSVFAQSGEATSAKVIRNKLTGQSEGYGFIEFVSHSVAERVLQTYNGAPMPSTEQTFRLNWAQAGAGEKRFQTEGPDHTIFVGDLAPEVTDYMLSDTFKNVYGSVKGAKVVLDRTTGRSKGYGFVRFADENEQMRAMTEMNGQYCSTRPMRIGPAANKNALPMQPAMYQNTQGANAGDNDPNNTTIFVGGLDANVTDDELKSIFGQFGELLHVKIPPGKRCGFVQYANKASAEHALSVLNGTQLGGQSIRLSWGRSPNKQSDQAQWNGGGYYGYPPQPQGGYGYAAQPPTQDPNAYYGGYTGYGNYQQQRQ

SEQ ID NO: 33294 - protein, 365 aa, Arabidopsis thaliana
  misc_feature (1)..(365): Ceres Seq. ID no. 13602671
MMMQQQQQQQQMQLSAAPLGQHQYGIGSQNPGSASDVKSLWIGDLQQWMDENYIMSVFAQSGEATSAKVIRNKLTGQSEGYGFIEFVSHSVAERVLQTYNGAPMPSTEQTFRLNWAQAGAGEKRFQTEGPDHTIFVGDLAPEVTDYMLSDTFKNVYGSVKGAKVVLDRTTGRSKGYGFVRFADENEQMRAMTEMNGQYCSTRPMRIGPAANKNALPMQPAMYQNTQGANAGDNDPNNTTIFVGGLDANVTDDELKSIFGQFGELLHVKIPPGKRCGFVQYANKASAEHALSVLNGTQLGGQSIRLSWGRSPNKQSDQAQWNGGGYYGYPPQPQGGYGYAAQPPTQDPNAYYGGYTGYGNYQQQRQ

SEQ ID NO: 33295 - protein, 364 aa, Arabidopsis thaliana
  misc_feature (1)..(364): Ceres Seq. ID no. 13602672
MMQQQQQQQQMQLSAAPLGQHQYGIGSQNPGSASDVKSLWIGDLQQWMDENYIMSVFAQSGEATSAKVIRNKLTGQSEGYGFIEFVSHSVAERVLQTYNGAPMPSTEQTFRLNWAQAGAGEKRFQTEGPDHTIFVGDLAPEVTDYMLSDTFKNVYGSVKGAKVVLDRTTGRSKGYGFVRFADENEQMRAMTEMNGQYCSTRPMRIGPAANKNALPMQPAMYQNTQGANAGDNDPNNTTIFVGGLDANVTDDELKSIFGQFGELLHVKIPPGKRCGFVQYANKASAEHALSVLNGTQLGGQSIRLSWGRSPNKQSDQAQWNGGGYYGYPPQPQGGYGYAAQPPTQDPNAYYGGYTGYGNYQQQRQ

SEQ ID NO: 33296 - DNA, 1372 bp, Arabidopsis thaliana
  misc_feature (1)..(1372): Ceres Seq. ID no. 13602673
aggaatcacagtgatgatcaagagtttatctctggcttctgctcgcatcttcttctctagaacctctccatcttttcttattcccttctcaaagctctctgtatctcatcgtcggaaattctcagtaatggccagtggaagcgacgagttcgtgaaaggaaatgtttatccaaatggcgttgctctcattactcttgatcgacctaaagctctcaacgccatgaatctagaaatggatttgaagtacaaaagcttgcttgatgaatgggaatatgatcctggagtcaaatgtgttgtcgtcgaaggaagcacatctcgggccttttgtgcaggaatggatattaaaggagttgttgcagagatcctaatggacaaaaatacgtctcttgtgcaaaaggtatttacagctgagtatagcctgatatgcaagattgctggatacagaaaaccatatatctctttaatggatggcataacaatgggatttggtcttggtctttctggacatggacgctaccgagtgataacagagaggacggtcctcgcaatgccagaaaatggaatcggcttgtttccagatgttggattttcatatattgcagctcatagccctggcgaaggatctgttggtgcttacctaggtatgactgggagaaggatttccacaccttcagatgcactgtttgtgggtcttgggacacattatgtaccatctggaaagctaggttcactcagagaagccattttgtcagctgacctttccaaggatccccaacaacacatccaagcaactttatcaaattacagcagtgatcctgaaactgagtcccacctccaaatgcttttgcctcagatagaatcagcttttagtgtaagtaagtctgttaaggaaacaatagaagagctgaaaaagttccagcagagcagtgaggcttcagttgcagaatgggctaatgaagcagtccaaggcattgaaaaaggggcacctttttctctttacctaacacacaagtacttctccaaagttgcttgtgccaagggtaaaaccaacaacgccatggcaacacttaacggtgtgatgataactgagtaccgcattgctctaagatctgcattgcgcagtgatttcactgaaggtgttagagcagtcttgactgacaaggaccagaatccgaaatggaaaccagcgagcttagacgaagtagatgaaaccgaagtggacgcgctctttatgccattaagtcctgaatttgaagagctaaacgtatgaaccaaacaacagagatattgcttagatcatgaattggtgattattgtgttgcagcttttgaacatatcccatatatttatcaaattttcaagtcgtagattg

SEQ ID NO: 33297 - protein, 422 aa, Arabidopsis thaliana
  misc_feature (1)..(422): Ceres Seq. ID no. 13602674
GITVMIKSLSLASARIFFSRTSPSFLIPFSKLSVSHRRKFSVMASGSDEFVKGNVYPNGVALITLDRPKALNAMNLEMDLKYKSLLDEWEYDPGVKCVVVEGSTSRAFCAGMDIKGVVAEILMDKNTSLVQKVFTAEYSLICKIAGYRKPYISLMDGITMGFGLGLSGHGRYRVITERTVLAMPENGIGLFPDVGFSYIAAHSPGEGSVGAYLGMTGRRISTPSDALFVGLGTHYVPSGKLGSLREAILSADLSKDPQQHIQATLSNYSSDPETESHLQMLLPQIESAFSVSKSVKETIEELKKFQQSSEASVAEWANEAVQGIEKGAPFSLYLTHKYFSKVACAKGKTNNAMATLNGVMITEYRIALRSALRSDFTEGVRAVLTDKDQNPKWKPASLDEVDETEVDALFMPLSPEFEELNV

SEQ ID NO: 33298 - protein, 418 aa, Arabidopsis thaliana [sequence omitted]

SEQ ID NO: 33299 - protein, 380 aa, Arabidopsis thaliana
  misc_feature (1)..(380): Ceres Seq. ID no. 13602676
MASGSDEFVKGNVYPNGVALITLDRPKALNAMNLEMDLKYKSLLDEWEYDPGVKCVVVEGSTSRAFCAGMDIKGVVAEILMDKNTSLVQKVFTAEYSLICKIAGYRKPYISLMDGITMGFGLGLSGHGRYRVITERTVLAMPENGIGLFPDVGFSYIAAHSPGEGSVGAYLGMTGRRISTPSDALFVGLGTHYVPSGKLGSLREAILSADLSKDPQQHIQATLSNYSSDPETESHLQMLLPQIESAFSVSKSVKETIEELKKFQQSSEASVAEWANEAVQGIEKGAPFSLYLTHKYFSKVACAKGKTNNAMATLNGVMITEYRIALRSALRSDFTEGVRAVLTDKDQNPKWKPASLDEVDETEVDALFMPLSPEFEELNV

SEQ ID NO: 33300 - DNA, 1073 bp, Arabidopsis thaliana
  misc_feature (1)..(1073): Ceres Seq. ID no. 13602677
ccatctaacaaaactcttgtacttaagcatggtggttaatcagaagatatccggccttgcatccgctatgaacgccaaaatcatcggttcaggagagagatcgatggtcttggcacacggtttcggaggcgaccagtcggtttgggataaaataataccggtcttgtcccaatccttcaaagttttggtctttgactggcttttctctggagccattaaagatcaaactctctatgacccttcaaagtataactccttagacgtcttctctgacgatctcattgctcttatggaggagttgaagtttggccctgtcgtgttcgtaggccattccatgtcgggggtgatcggttgtgctgcttctattaaaaggcccgacttgtttacaaatcttctccttattgctgcttctccaaggtatataaacagtgaggattacaaaggagggtttgagtcaaaagacattgacacgatcattaccagcattggctccaactacgaagcttgggcggttgatttctcctcattcgtggtcgactcgagagactctctctcggtccaaaggttcgagaagtcccttaagaagatgaagcccgagacagctcttgccttagctaagatagtgtttggtagcgacgagagagagattttgggacaagtgtcagtgccttgccatgtcatacaaccaggaaacgacgtcgtagtgcctgtctccgtcgcatacttcatgcaggagaagattaaggggaaatcgacagtggagatcatcgaggacgcgatcgggcattttccacagatgacatcacatttggagctgcttggcgtcatgaggcgcctccttgagttttaaggcttatataagagctttgcgtcgtttgatcgagtttcttcttgtctataatatcgtattactaatataacgaagtgggtctattagaatttttcatatatgtttgtgtaatgtgaatgtgttattatattcttagcacaatgattttcatttttagtgttttttttttaaacataggattgaaagtaatatgttataagtttctttatatcacactgtcaaa

SEQ ID NO: 33301 - protein, 282 aa, Arabidopsis thaliana
  misc_feature (1)..(282): Ceres Seq. ID no. 13602678
HLTKLLYLSMVVNQKISGLASAMNAKIIGSGERSMVLAHGFGGDQSVWDKIIPVLSQSFKVLVFDWLFSGAIKDQTLYDPSKYNSLDVFSDDLIALMEELKFGPVVFVGHSMSGVIGCAASIKRPDLFTNLLLIAASPRYINSEDYKGGFESKDIDTIITSIGSNYEAWAVDFSSFVVDSRDSLSVQRFEKSLKKMKPETALALAKIVFGSDEREILGQVSVPCHVIQPGNDVVVPVSVAYFMQEKIKGKSTVEIIEDAIGHFPQMTSHLELLGVMRRLLEF

SEQ ID NO: 33302 - protein, 273 aa, Arabidopsis thaliana
  misc_feature (1)..(273): Ceres Seq. ID no. 13602679
MVVNQKISGLASAMNAKIIGSGERSMVLAHGFGGDQSVWDKIIPVLSQSFKVLVFDWLFSGAIKDQTLYDPSKYNSLDVFSDDLIALMEELKFGPVVFVGHSMSGVIGCAASIKRPDLFTNLLLIAASPRYINSEDYKGGFESKDIDTIITSIGSNYEAWAVDFSSFVVDSRDSLSVQRFEKSLKKMKPETALALAKIVFGSDEREILGQVSVPCHVIQPGNDVVVPVSVAYFMQEKIKGKSTVEIIEDAIGHFPQMTSHLELLGVMRRLLEF

SEQ ID NO: 33303 - protein, 260 aa, Arabidopsis thaliana
  misc_feature (1)..(260): Ceres Seq. ID no. 13602680
MNAKIIGSGERSMVLAHGFGGDQSVWDKIIPVLSQSFKVLVFDWLFSGAIKDQTLYDPSKYNSLDVFSDDLIALMEELKFGPVVFVGHSMSGVIGCAASIKRPDLFTNLLLIAASPRYINSEDYKGGFESKDIDTIITSIGSNYEAWAVDFSSFVVDSRDSLSVQRFEKSLKKMKPETALALAKIVFGSDEREILGQVSVPCHVIQPGNDVVVPVSVAYFMQEKIKGKSTVEIIEDAIGHFPQMTSHLELLGVMRRLLEF

SEQ ID NO: 33304 - DNA, 1042 bp, Arabidopsis thaliana
  misc_feature (1)..(1042): Ceres Seq. ID no. 13602696
tccaaataaaaaaaaaaacccccccccccccccccggagaaagccattgtttcagttgatgatggtgatgatatctcttcacttctctactccgccgctagcttttctcaaatctgattccaattccagatttctcaagaaccctaatcctaattttatccaattcaccccaaaatcccaacttcttttcccccaacgtctcaatttcaacaccggaacaaatttaaaccggcgaactctgagttgctatgggattaaggattcaagtgagacaacgaagtctgcgccgtcattagactccggcgacggtggcggcggagatggtggtgatgatgataaaggtgaagtggaggaaaaaaacagactttttccggaatggttggattttacctcggatgatgcacagactgtgtttgtggctatagctgtatcgttggcgtttcgttattttatcgcagaaccaagatatattccttctttgtctatgtatcctacttttgatgttggagacagattagttgcagagaaggtgagttattatttcaggaagccttgtgcaaatgatattgtcatctttaaaagtccaccagttcttcaggaagttgggtatactgatgccgatgtatttattaaacggattgttgccaaagaaggtgaccttgtggaggtacataatgggaaactgatggttaatggtgttgctaggaatgaaaaattcatcttagagcctcctggttatgaaatgacaccaattagggtaccggaaaattcagtctttgtgatgggtgataaccggaataacagttatgattcgcacgtatggggtcctctgcctttgaagaatattattggacggtcggtttttcggtattggccaccaaacagagtaagcgggacagtgctagaaggtggctgtgctgtggataagcaatagaacatattgtaacgttttgattcggcatgtcttcatttgaaacacttgtgcagataaaaacgaaaacaatgtacctttttatgaaggagagagttgcacatttgaatt

SEQ ID NO: 33305 - protein, 310 aa, Arabidopsis thaliana
  misc_feature (1)..(310): Ceres Seq. ID no. 13602697
PNKKKNPPPPPRRKPLFQLMMVMISLHFSTPPLAFLKSDSNSRFLKNPNPNFIQFTPKSQLLFPQRLNFNTGTNLNRRTLSCYGIKDSSETTKSAPSLDSGDGGGGDGGDDDKGEVEEKNRLFPEWLDFTSDDAQTVFVAIAVSLAFRYFIAEPRYIPSLSMYPTFDVGDRLVAEKVSYYFRKPCANDIVIFKSPPVLQEVGYTDADVFIKRIVAKEGDLVEVHNGKLMVNGVARNEKFILEPPGYEMTPIRVPENSVFVMGDNRNNSYDSHVWGPLPLKNIIGRSVFRYWPPNRVSGTVLEGGCAVDKQ

SEQ ID NO: 33306 - protein, 291 aa, Arabidopsis thaliana
  misc_feature (1)..(291): Ceres Seq. ID no. 13602698
MMVMISLHFSTPPLAFLKSDSNSRFLKNPNPNFIQFTPKSQLLFPQRLNFNTGTNLNRRTLSCYGIKDSSETTKSAPSLDSGDGGGGDGGDDDKGEVEEKNRLFPEWLDFTSDDAQTVFVAIAVSLAFRYFIAEPRYIPSLSMYPTFDVGDRLVAEKVSYYFRKPCANDIVIFKSPPVLQEVGYTDADVFIKRIVAKEGDLVEVHNGKLMVNGVARNEKFILEPPGYEMTPIRVPENSVFVMGDNRNNSYDSHVWGPLPLKNIIGRSVFRYWPPNRVSGTVLEGGCAVDKQ

SEQ ID NO: 33307 - protein, 290 aa, Arabidopsis thaliana
  misc_feature (1)..(290): Ceres Seq. ID no. 13602699
MVMISLHFSTPPLAFLKSDSNSRFLKNPNPNFIQFTPKSQLLFPQRLNFNTGTNLNRRTLSCYGIKDSSETTKSAPSLDSGDGGGGDGGDDDKGEVEEKNRLFPEWLDFTSDDAQTVFVAIAVSLAFRYFIAEPRYIPSLSMYPTFDVGDRLVAEKVSYYFRKPCANDIVIFKSPPVLQEVGYTDADVFIKRIVAKEGDLVEVHNGKLMVNGVARNEKFILEPPGYEMTPIRVPENSVFVMGDNRNNSYDSHVWGPLPLKNIIGRSVFRYWPPNRVSGTVLEGGCAVDKQ

SEQ ID NO: 33308 - DNA, 1062 bp, Arabidopsis thaliana
  misc_feature (1)..(1062): Ceres Seq. ID no. 13602711
ttttccaagaaaataaaaaacagaaaaaattcgtggaaacgccattaacgagatctagcacaaactcgtagtgtggtgtagaagaagacaaaagcaaggagcttcataataaaaccctagagatatttgtttctccaatttcaaaagacgagacgtgaagaagacgatcgaagatgaacattttcagattagctggtgatatgactcacctagccagtgttcttgtcttgcttctcaagatccacaccatcaaatcctgcgctggtgtttcattgaagactcaagaactctatgccattgtctttgcgacgcgttatttggatattttcacgagttttgtgtctctgtacaacacctctatgaagttggtgtttttaggaagttctttttcgattgtgtggtacatgaagtatcataaggccgtccacaggacttacgacagagagcaagatacgtttcgtcattggttccttgtgcttccttgctttctcttagctcttttgatacatgaaaagtttacctttcttgaggtattgtggacgtcttcattgtacttggaggctgttgccatattacctcagcttgtcttgttgcaaaggactagaaatattgacaacttgaccggacaatatatatttctccttggggggtaccgtggattatacatcctcaactggatctaccgttacttcactgagccgcactttgttcactggataacatggatcgccgggtttgttcaaacactgctctatgccgacttcttctattattatttcctaagctggaagaacaacaaaaagctccaattaccagcttaatttctaaagtttcaatgctcgggaaccctacggattcgatttggtgcccgacaaaacatctaccggaatgttaccaatttactctgttggtggttattagaggagaacgagcatagatgtgtaaactccagcaatctaacttattacactttctttagactttctcgtctctcatcttttttttggtcgacttagtgttactaaatatttcgacgcgacagtaatatattcaccacaattc

SEQ ID NO: 33309 - protein, 215 aa, Arabidopsis thaliana
  misc_feature (1)..(215): Ceres Seq. ID no. 13602712
MNIFRLAGDMTHLASVLVLLLKIHTIKSCAGVSLKTQELYAIVFATRYLDIFTSFVSLYNTSMKLVFLGSSFSIVWYMKYHKAVHRTYDREQDTFRHWFLVLPCFLLALLIHEKFTFLEVLWTSSLYLEAVAILPQLVLLQRTRNIDNLTGQYIFLLGGYRGLYILNWIYRYFTEPHFVHWITWIAGFVQTLLYADFFYYYFLSWKNNKKLQLPA

SEQ ID NO: 33310 - protein, 206 aa, Arabidopsis thaliana
  misc_feature (1)..(206): Ceres Seq. ID no. 13602713
MTHLASVLVLLLKIHTIKSCAGVSLKTQELYAIVFATRYLDIFTSFVSLYNTSMKLVFLGSSFSIVWYMKYHKAVHRTYDREQDTFRHWFLVLPCFLLALLIHEKFTFLEVLWTSSLYLEAVAILPQLVLLQRTRNIDNLTGQYIFLLGGYRGLYILNWIYRYFTEPHFVHWITWIAGFVQTLLYADFFYYYFLSWKNNKKLQLPA

SEQ ID NO: 33311 - protein, 153 aa, Arabidopsis thaliana
  misc_feature (1)..(153): Ceres Seq. ID no. 13602714
MKLVFLGSSFSIVWYMKYHKAVHRTYDREQDTFRHWFLVLPCFLLALLIHEKFTFLEVLWTSSLYLEAVAILPQLVLLQRTRNIDNLTGQYIFLLGGYRGLYILNWIYRYFTEPHFVHWITWIAGFVQTLLYADFFYYYFLSWKNNKKLQLPA

SEQ ID NO: 33312 - DNA, 1919 bp, Arabidopsis thaliana
  misc_feature (1)..(1919): Ceres Seq. ID no. 13602718
acactgtgagattcaagtgtaaagtgctctctccccaatggctaatcaccaccgacttttacgcggcggcggatctccggccataatcggtggcagaatcacactcacagctttcgcttccactatcgcactcttcctcttcactctctccttcttcttcgcttcagattctaacgattctcctgatctccttcttcccggtgttgagtactctaatggagtcggatctagaagatccatgttggatatcaaatcggatccgcttaagccacggttgattcagatccggaaacaagctgatgatcatcggtcattagcattagcttatgcttcttacgcgagaaagcttaagctcgagaattcgaaactcgtcaggatcttcgctgatctttcgaggaattacacggatctgattaacaaaccgacgtatcgagctttgtatgattctgatggagcctcgattgaagaatctgtgcttaggcaatttgagaaagaagttaaggaacggattaaaatgactcgtcaagtgattgctgaagctaaagagtcttttgataatcagttgaagattcagaagctgaaagatacgattttcgctgttaacgaacagttaactaatgctaagaagcaaggtgcgttttcgagtttgatcgctgcgaaatcgattccgaaaggattgcattgtcttgctatgaggctgatggaagagaggattgctcaccctgagaagtatactgatgaagggaaagatagaccgcgggagctcgaggatccgaatctttaccattacgctatattttcggataatgtgattgcggcttcggtggttgtgaactctgctgtgaagaatgctaaggagccgtggaagcatgtttttcacgttgtgactgataagatgaatcttggagctatgcaggttatgtttaaactgaaggagtataaaggagctcatgtagaagttaaagctgttgaggattatacgtttttgaactcttcgtatgtgcctgtgttgaagcagttagaatctgcgaatcttcagaagttttatttcgagaataagctcgagaatgcgacgaaagataccacgaatatgaagttcaggaaccccaagtatttatctatattgaatcacttgaggttttatttacccgagatgtacccgaaactacataggatactgtttttggacgatgatgtggttgtgcagaaggatttaacgggtctgtgggagattgatatggatgggaaagtgaatggagctgtagagacttgttttgggtcgtttcatcggtacgctcaatacatgaatttctcacatcctttgatcaaagagaagtttaatcccaaagcatgtgcgtgggcgtatggaatgaacttctttgatcttgatgcttggagaagagagaagtgcacagaagaatatcactactggcaaaatctgaacgagaacagggctctatggaaactggggacgttaccaccgggactgatcaccttttactcaaccacaaagccgctggacaaatcatggcatgtgcttgggctgggttacaatccgagcattagcatggatgagatccgcaacgctgcagtggtacacttcaacggtaacatgaagccatggcttgacatagctatgaaccagtttcgaccactttggaccaaacacgtcgactatgacctcgagtttgttcaggcttgcaattttggcctctgaactatgaaaattttctttatcatcaaaatctgaaagcatatgttgtttgttacttcagctctacgaagttttaaccttagtttttgtttgtgtttatttatatatttttgggggtttagtagaacacttgtattttgttcatagctatctttgttctatggcaacctataatcaaagcttaattataaagtcacattatgcc

SEQ ID NO: 33313 - protein, 559 aa, Arabidopsis thaliana
  misc_feature (1)..(559): Ceres Seq. ID no. 13602719
MANHHRLLRGGGSPAIIGGRITLTAFASTIALFLFTLSFFFASDSNDSPDLLLPGVEYSNGVGSRRSMLDIKSDPLKPRLIQIRKQADDHRSLALAYASYARKLKLENSKLVRIFADLSRNYTDLINKPTYRALYDSDGASIEESVLRQFEKEVKERIKMTRQVIAEAKESFDNQLKIQKLKDTIFAVNEQLTNAKKQGAFSSLIAAKSIPKGLHCLAMRLMEERIAHPEKYTDEGKDRPRELEDPNLYHYAIFSDNVIAASVVVNSAVKNAKEPWKHVFHVVTDKMNLGAMQVMFKLKEYKGAHVEVKAVEDYTFLNSSYVPVLKQLESANLQKFYFENKLENATKDTTNMKFRNPKYLSILNHLRFYLPEMYPKLHRILFLDDDVVVQKDLTGLWEIDMDGKVNGAVETCFGSFHRYAQYMNFSHPLIKEKFNPKACAWAYGMNFFDLDAWRREKCTEEYHYWQNLNENRALWKLGTLPPGLITFYSTTKPLDKSWHVLGLGYNPSISMDEIRNAAVVHFNGNMKPWLDIAMNQFRPLWTKHVDYDLEFVQACNFGL

SEQ ID NO: 33314 - protein, 492 aa, Arabidopsis thaliana
  misc_feature (1)..(492): Ceres Seq. ID no. 13602720
MLDIKSDPLKPRLIQIRKQADDHRSLALAYASYARKLKLENSKLVRIFADLSRNYTDLINKPTYRALYDSDGASIEESVLRQFEKEVKERIKMTRQVIAEAKESFDNQLKIQKLKDTIFAVNEQLTNAKKQGAFSSLIAAKSIPKGLHCLAMRLMEERIAHPEKYTDEGKDRPRELEDPNLYHYAIFSDNVIAASVVVNSAVKNAKEPWKHVFHVVTDKMNLGAMQVMFKLKEYKGAHVEVKAVEDYTFLNSSYVPVLKQLESANLQKFYFENKLENATKDTTNMKFRNPKYLSILNHLRFYLPEMYPKLHRILFLDDDVVVQKDLTGLWEIDMDGKVNGAVETCFGSFHRYAQYMNFSHPLIKEKFNPKACAWAYGMNFFDLDAWRREKCTEEYHYWQNLNENRALWKLGTLPPGLITFYSTTKPLDKSWHVLGLGYNPSISMDEIRNAAVVHFNGNMKPWLDIAMNQFRPLWTKHVDYDLEFVQACNFGL

SEQ ID NO: 33315 - protein, 400 aa, Arabidopsis thaliana
  misc_feature (1)..(400): Ceres Seq. ID no. 13602721
MTRQVIAEAKESFDNQLKIQKLKDTIFAVNEQLTNAKKQGAFSSLIAAKSIPKGLHCLAMRLMEERIAHPEKYTDEGKDRPRELEDPNLYHYAIFSDNVIAASVVVNSAVKNAKEPWKHVFHVVTDKMNLGAMQVMFKLKEYKGAHVEVKAVEDYTFLNSSYVPVLKQLESANLQKFYFENKLENATKDTTNMKFRNPKYLSILNHLRFYLPEMYPKLHRILFLDDDVVVQKDLTGLWEIDMDGKVNGAVETCFGSFHRYAQYMNFSHPLIKEKFNPKACAWAYGMNFFDLDAWRREKCTEEYHYWQNLNENRALWKLGTLPPGLITFYSTTKPLDKSWHVLGLGYNPSISMDEIRNAAVVHFNGNMKPWLDIAMNQFRPLWTKHVDYDLEFVQACNFGL

SEQ ID NO: 33316 - DNA, 684 bp, Arabidopsis thaliana
  misc_feature (1)..(684): Ceres Seq. ID no. 13602729
agttgtcttccacaacaaaagagtaccctgaaacagatctttcgtataatcagtgacgtagagatcgaagacgatgatgagctctgcatccgccatgaaagctgttggatttttgcttctgcttaccattctaacattagcttatgcgaagaagtcaggtgatgtgacagagttgcagattggtgttaagtacaagcctcagaaatgtgatctccaggctcacaaaggggataagatcaaggttcactatcggggaaagttaactgatggaactgtctttgattcaagttttgagagaggtgaccctattgagtttgagcttggaactggtcaagtcatcccaggatgggaccagggtttattgggagcttgtgtaggtgagaagagaaagttgaaaatcccatccaagcttggttatggtgataacggctcaccaccaaaaatcccgggtggggcgacactgatattcgacaccgagcttgttgctgtgaacggagaaccatccagcgaagcgaaatcaaagaatgagctttgattacaccataattgtttttcatttaaaaggaaaccttgagtagtcatcgatgttggcatttgaatcttaaacagcctagaatcatttactttgctagttgaagacaataattatattttggtcataacattagttatgttggcagttct

SEQ ID NO: 33317 - protein, 153 aa, Arabidopsis thaliana
  misc_feature (1)..(153): Ceres Seq. ID no. 13602730
MMSSASAMKAVGFLLLLTILTLAYAKKSGDVTELQIGVKYKPQKCDLQAHKGDKIKVHYRGKLTDGTVFDSSFERGDPIEFELGTGQVIPGWDQGLLGACVGEKRKLKIPSKLGYGDNGSPPKIPGGATLIFDTELVAVNGEPSSEAKSKNEL

SEQ ID NO: 33318 - protein, 152 aa, Arabidopsis thaliana
  misc_feature (1)..(152): Ceres Seq. ID no. 13602731
MSSASAMKAVGFLLLLTILTLAYAKKSGDVTELQIGVKYKPQKCDLQAHKGDKIKVHYRGKLTDGTVFDSSFERGDPIEFELGTGQVIPGWDQGLLGACVGEKRKLKIPSKLGYGDNGSPPKIPGGATLIFDTELVAVNGEPSSEAKSKNEL

SEQ ID NO: 33319 - protein, 146 aa, Arabidopsis thaliana
  misc_feature (1)..(146): Ceres Seq. ID no. 13602732
MKAVGFLLLLTILTLAYAKKSGDVTELQIGVKYKPQKCDLQAHKGDKIKVHYRGKLTDGTVFDSSFERGDPIEFELGTGQVIPGWDQGLLGACVGEKRKLKIPSKLGYGDNGSPPKIPGGATLIFDTELVAVNGEPSSEAKSKNEL

SEQ ID NO: 33320 - DNA, 611 bp, Arabidopsis thaliana
  misc_feature (1)..(611): Ceres Seq. ID no. 13602733
gatttctgatctttgccctcttttcataagatagttagggttttagtcttttgtgtaataattcattgatcatgaacaagggagaagaaggaggagaagacaaggaagtggtttctcttcaaactctgagtaagaaaatggatgattttgcaaaagctagagattgggagaagtatcacagtccaaggaatctccttcttgctatggtgggtgaagtgggagagctatcagagatattccaatggaaaggagaagtagcaagaggatgtccagattggaaagaagaagagaaagtccatcttggagaagagttatcagatgttttgttgtatttggtgaggctttcggatgcgtgtggtgtcgatttaggcaaagccgctctgcgcaagatcgagcttaatgctattaagtatccagttcccaaaaagactgatgatcattgtgttggtgatggtgaagattcaagcagcaagattaagttgaatgaagaaaactaatctctcttattagtggttttgtgagtaagtttattgtgggtattttcttgttatgaagtaggagcatgatcaagaacatataatcttcgaaggcctctaattatatttcagatg

SEQ ID NO: 33321 - protein, 141 aa, Arabidopsis thaliana
  misc_feature (1)..(141): Ceres Seq. ID no. 13602734
MNKGEEGGEDKEVVSLQTLSKKMDDFAKARDWEKYHSPRNLLLAMVGEVGELSEIFQWKGEVARGCPDWKEEEKVHLGEELSDVLLYLVRLSDACGVDLGKAALRKIELNAIKYPVPKKTDDHCVGDGEDSSSKIKLNEEN

SEQ ID NO: 33322 - protein, 119 aa, Arabidopsis thaliana
  misc_feature (1)..(119): Ceres Seq. ID no. 13602735
MDDFAKARDWEKYHSPRNLLLAMVGEVGELSEIFQWKGEVARGCPDWKEEEKVHLGEELSDVLLYLVRLSDACGVDLGKAALRKIELNAIKYPVPKKTDDHCVGDGEDSSSKIKLNEEN

SEQ ID NO: 33323 - protein, 97 aa, Arabidopsis thaliana
  misc_feature (1)..(97): Ceres Seq. ID no. 13602736
MVGEVGELSEIFQWKGEVARGCPDWKEEEKVHLGEELSDVLLYLVRLSDACGVDLGKAALRKIELNAIKYPVPKKTDDHCVGDGEDSSSKIKLNEEN

SEQ ID NO: 33324 - DNA, 1080 bp, Arabidopsis thaliana
  misc_feature (1)..(1080): Ceres Seq. ID no. 13602741
aaaaggctccggctttatcattctcagaccatcatcactaagcagtaagtaagcactataatcgcagaagatagataaaatggaagtagggtttctgggtttgggaatcatgggaaaagccatgtcaatgaatctattgaagaatggattcaaagtcactgtatggaacagaacactctccaagtgtgatgagcttgtggagcatggtgcatcagtatgtgagagtccagctgaagtaatcaagaaatgcaaatacactattgctatgctctctgatccttgtgctgctctttcggttgttttcgataaaggcggtgttttggagcagatatgtgaaggaaaaggttatatcgatatgtcgactgttgatgcagagacttctttgaagatcaatgaggcaatcaccgggaagggtggtcggttcgtagaaggtccggtttcaggtagcaaaaagccagctgaagatggccaactcattatccttgctgctggtgacaaggcactctttgaggaatcaatcccagcttttgatgtcttggggaagagatcgttttacttgggacaagttggaaacggagctaaaatgaagctaatagtgaacatgataatgggaagcatgatgaatgcattctctgaggggcttgtattggctgacaagagtggacttagctctgacactcttttggatattctggatctgggagcaatgactaacccgatgttcaaggggaaaggaccttcaatgaacaagagtagttacccaccagcatttccattgaaacatcagcagaaagacatgaggctagctcttgctcttggcgatgaaaacgcggtttccatgcctgtagccgcggctgcaaacgaggcttttaagaaggcgagaagcttgggactaggagatctcgacttctctgctgtgattgaagctgtgaaattctcccgcgaatagcaaactgtttcaaaacatccactcatttggattggctgagatactgaaatcattgttatcttcccaaatagagatttactcatttggccaaacacacattttactccttcaccaaataaaaagtcttaacc

SEQ ID NO: 33325 - protein, 289 aa, Arabidopsis thaliana
  misc_feature (1)..(289): Ceres Seq. ID no. 13602742
MEVGFLGLGIMGKAMSMNLLKNGFKVTVWNRTLSKCDELVEHGASVCESPAEVIKKCKYTIAMLSDPCAALSVVFDKGGVLEQICEGKGYIDMSTVDAETSLKINEAITGKGGRFVEGPVSGSKKPAEDGQLIILAAGDKALFEESIPAFDVLGKRSFYLGQVGNGAKMKLIVNMIMGSMMNAFSEGLVLADKSGLSSDTLLDILDLGAMTNPMFKGKGPSMNKSSYPPAFPLKHQQKDMRLALALGDENAVSMPVAAAANEAFKKARSLGLGDLDFSAVIEAVKFSRE

SEQ ID NO: 33326 - protein, 279 aa, Arabidopsis thaliana
  misc_feature (1)..(279): Ceres Seq. ID no. 13602743
MGKAMSMNLLKNGFKVTVWNRTLSKCDELVEHGASVCESPAEVIKKCKYTIAMLSDPCAALSVVFDKGGVLEQICEGKGYIDMSTVDAETSLKINEAITGKGGRFVEGPVSGSKKPAEDGQLIILAAGDKALFEESIPAFDVLGKRSFYLGQVGNGAKMKLIVNMIMGSMMNAFSEGLVLADKSGLSSDTLLDILDLGAMTNPMFKGKGPSMNKSSYPPAFPLKHQQKDMRLALALGDENAVSMPVAAAANEAFKKARSLGLGDLDFSAVIEAVKFSRE

SEQ ID NO: 33327 - protein, 275 aa, Arabidopsis thaliana
  misc_feature (1)..(275): Ceres Seq. ID no. 13602744
MSMNLLKNGFKVTVWNRTLSKCDELVEHGASVCESPAEVIKKCKYTIAMLSDPCAALSVVFDKGGVLEQICEGKGYIDMSTVDAETSLKINEAITGKGGRFVEGPVSGSKKPAEDGQLIILAAGDKALFEESIPAFDVLGKRSFYLGQVGNGAKMKLIVNMIMGSMMNAFSEGLVLADKSGLSSDTLLDILDLGAMTNPMFKGKGPSMNKSSYPPAFPLKHQQKDMRLALALGDENAVSMPVAAAANEAFKKARSLGLGDLDFSAVIEAVKFSRE

SEQ ID NO: 33328 - DNA, 893 bp, Arabidopsis thaliana
  misc_feature (1)..(893): Ceres Seq. ID no. 13602745
gtcgtcgtcatcatcaacaattcgaatctgaaatctgcaattcacgagaagaagtttttttttgtaacaatggcgaatccaattcaagagattattgagaaacaagttctaacggtagcgaaagctatggaggataagatagacgacgagatagcgtctctggaaaagcttgatgaagatgatttggaagttttgagagagaggagattgaagcagatgaagaaaatggcggagaagaagaaacggtggatgagtattggacatggtgaatactctgagattcattctgagaaagatttcttctccgttgttaaatctagtgaacgcgtcgtttgtcacttctaccgtgagaattggccctgtaaagtgatggataaacacatgagcatattggcaaagcaacacattgagacacgtttcgtgaagatccaagctgagaaaagtccattcttggctgagaggcttaagattgttgttcttcccactcttgccctcattaagaacactaaagtcgatgattatgtggttgggttcaatgaactgggagggaaagatgattttagcacagaagatcttgaagagagaatagccagagcgcaagtgatccattacgagggagaatcatctcttaaacaaaagtctacaacacaagtcagaaggaacgtgaggcagagtgctcgttcagattctgactccgaataaatcccttttcttatcaaaggtttgttcgtttgtatcctcttgttagttgtaatacttgcaattcatcgttttgatgatcaaaatcaatgttgatcgttagattgatgaacatgcaatatctagaatactacattgatgttttatatgttacctagtgagagtgttggaatgaccaaagtctttttgagttt

SEQ ID NO: 33329 - protein, 233 aa, Arabidopsis thaliana
  misc_feature (1)..(233): Ceres Seq. ID no. 13602746
VVVIINNSNLKSAIHEKKFFFVTMANPIQEIIEKQVLTVAKAMEDKIDDEIASLEKLDEDDLEVLRERRLKQMKKMAEKKKRWMSIGHGEYSEIHSEKDFFSVVKSSERVVCHFYRENWPCKVMDKHMSILAKQHIETRFVKIQAEKSPFLAERLKIVVLPTLALIKNTKVDDYVVGFNELGGKDDFSTEDLEERIARAQVIHYEGESSLKQKSTTQVRRNVRQSARSDSDSE

SEQ ID NO: 33330 - protein, 210 aa, Arabidopsis thaliana
  misc_feature (1)..(210): Ceres Seq. ID no. 13602747
MANPIQEIIEKQVLTVAKAMEDKIDDEIASLEKLDEDDLEVLRERRLKQMKKMAEKKKRWMSIGHGEYSEIHSEKDFFSVVKSSERVVCHFYRENWPCKVMDKHMSILAKQHIETRFVKIQAEKSPFLAERLKIVVLPTLALIKNTKVDDYVVGFNELGGKDDFSTEDLEERIARAQVIHYEGESSLKQKSTTQVRRNVRQSARSDSDSE

SEQ ID NO: 33331 - protein, 191 aa, Arabidopsis thaliana
  misc_feature (1)..(191): Ceres Seq. ID no. 13602748
MEDKIDDEIASLEKLDEDDLEVLRERRLKQMKKMAEKKKRWMSIGHGEYSEIHSEKDFFSVVKSSERVVCHFYRENWPCKVMDKHMSILAKQHIETRFVKIQAEKSPFLAERLKIVVLPTLALIKNTKVDDYVVGFNELGGKDDFSTEDLEERIARAQVIHYEGESSLKQKSTTQVRRNVRQSARSDSDSE

SEQ ID NO: 33332 - DNA, 949 bp, Arabidopsis thaliana
  misc_feature (1)..(949): Ceres Seq. ID no. 13602761
attaaaaccaaagatcaatctcttcttaatagtcaatcatatatcaaaaaatttaaactcttcttgatcaatggcttcttcttctgctgctatgtctcttgaatccatctctatgacaactctcaacaatctctctcgtaatcatcaatctcaccgcagttctcttcttggtttctcaagatctttccaaaaccttggaatctcatctaacggtccagatttctcctcccgatcaagatctactacttccaagaacctcaacgttactcgagctttcttctggaattggggcaagaagaccgaaaactccagaccaagtaagatccaagaactaaacgtgtatgagctcaacgaaggagatagaaacagtccagcagttcttaaactcggcaagaaaccaacagagctttgtctcggagatctcgtcccattcacaaacaaactctacaccggcgatctcaagaaacgcgtgggaatcacggcaggtctctgcgttttgatccaacacgttcctgaaaagagcggtgacagattcgaagctagttacagcttctactttggtgactatggtcacttgtctgtacaaggacaatacttgacttatgaagacacgttcctcgctgtcactggtggctctggaatctttgaaggtgcgtacggacaggttaagcttcgtcagcttgtgtatccgacaaaactgttctacactttttaccttaaagggttagctaatgatttaccgctggagcttactggaacggcggttacgccgtcgaaggatgtgaaaccggcaccggaagctaaggcgatggagcctagtggagttataagtaactttactaattaagtaattagctgtttaatagttgttttgttttgtaatagaatattttgatgagttgtgtgaggttagttaatgatgtgttgagggaataaagtatttattttg

SEQ ID NO: 33333 - protein, 258 aa, Arabidopsis thaliana
  misc_feature (1)..(258): Ceres Seq. ID no. 13602762
MASSSAAMSLESISMTTLNNLSRNHQSHRSSLLGFSRSFQNLGISSNGPDFSSRSRSTTSKNLNVTRAFFWNWGKKTENSRPSKIQELNVYELNEGDRNSPAVLKLGKKPTELCLGDLVPFTNKLYTGDLKKRVGITAGLCVLIQHVPEKSGDRFEASYSFYFGDYGHLSVQGQYLTYEDTFLAVTGGSGIFEGAYGQVKLRQLVYPTKLFYTFYLKGLANDLPLELTGTAVTPSKDVKPAPEAKAMEPSGVISNFTN

SEQ ID NO: 33334 - protein, 251 aa, Arabidopsis thaliana
  misc_feature (1)..(251): Ceres Seq. ID no. 13602763
MSLESISMTTLNNLSRNHQSHRSSLLGFSRSFQNLGISSNGPDFSSRSRSTTSKNLNVTRAFFWNWGKKTENSRPSKIQELNVYELNEGDRNSPAVLKLGKKPTELCLGDLVPFTNKLYTGDLKKRVGITAGLCVLIQHVPEKSGDRFEASYSFYFGDYGHLSVQGQYLTYEDTFLAVTGGSGIFEGAYGQVKLRQLVYPTKLFYTFYLKGLANDLPLELTGTAVTPSKDVKPAPEAKAMEPSGVISNFTN

SEQ ID NO: 33335 - protein, 244 aa, Arabidopsis thaliana
  misc_feature (1)..(244): Ceres Seq. ID no. 13602764
MTTLNNLSRNHQSHRSSLLGFSRSFQNLGISSNGPDFSSRSRSTTSKNLNVTRAFFWNWGKKTENSRPSKIQELNVYELNEGDRNSPAVLKLGKKPTELCLGDLVPFTNKLYTGDLKKRVGITAGLCVLIQHVPEKSGDRFEASYSFYFGDYGHLSVQGQYLTYEDTFLAVTGGSGIFEGAYGQVKLRQLVYPTKLFYTFYLKGLANDLPLELTGTAVTPSKDVKPAPEAKAMEPSGVISNFTN

SEQ ID NO: 33336 - DNA, 1302 bp, Arabidopsis thaliana
  misc_feature (1)..(1302): Ceres Seq. ID no. 13602772
gttgtatttttgatagggaagaaaaaaaaacacaaaagcggcgttgatttttttagattttccgacaagatttctcgtgagaagatttgtctgaatctttctttcgaagaggttttgagttaatttcaaaatggttttggagaaaaaatctgcattgttggaagatttgataaagaaatgcggcggttgtgcggtggtcgacggtggtttcgctacccagcttgagattcacggcgccgccattaacgaccctttgtggagtgctgtttctctcatcaaaaatcctgagctcatcaaaagggttcacatggaatatttggaagctggtgcagacattgtggttacttcatcttatcaggctacgatcccggggtttctttctagaggtttatcaatagaagagagcgagtctttgcttcaaaagagtgtagaattagctgttgaagctcgtgatagattctgggagaaagtgagcaaggtttcaggacatagctataacagagctcttgtagctgcatctattggaagctatggtgcttatcttgctgatggctctgagtacagtggtcactatggtgagaatgtaagtttggataaactaaaggactttcacaggagaagacttcaagtcttagtggaagctggtcctgatcttcttgcttttgaaaccataccgaataaactcgaagctcaggcttgcgttgagcttttggaggaagagaaagtgcaaatcccagcatggatctgcttcacatctgtagatggtgagaaagctccatcaggagagagctttgaggaatgtcttgaacctcttaacaaaagcaacaatatttacgcagttggtattaactgcgcacctcctcaattcatcgaaaatctgattcgcaaattcgccaagctgacgaagaaagcaatcgttgtttacccgaatagcggagaggtttgggatggaaaagctaaacaatggctgccatcacaatgctttggtgatgatgaatttgagatgtttgcaacgaaatggcgtgaccttggagctaaactcatcggaggatgttgcaggactacaccttccaccattaacgctatctccagagatttgaaacgaagatgatttttcttcagggagaaaagactgaagattctttttcaactttttaactagcttgaccattgttagggctatctatctgttttctgttgttttcttgttgttcacgttttctttgtggtttgatgatatgtattcgtaaactaggccttgggcgttttcaatgtaatggcccataaaatattttctttatc

SEQ ID NO: 33337 - protein, 326 aa, Arabidopsis thaliana
  misc_feature (1)..(326): Ceres Seq. ID no. 13602773
MVLEKKSALLEDLIKKCGGCAVVDGGFATQLEIHGAAINDPLWSAVSLIKNPELIKRVHMEYLEAGADIVVTSSYQATIPGFLSRGLSIEESESLLQKSVELAVEARDRFWEKVSKVSGHSYNRALVAASIGSYGAYLADGSEYSGHYGENVSLDKLKDFHRRRLQVLVEAGPDLLAFETIPNKLEAQACVELLEEEKVQIPAWICFTSVDGEKAPSGESFEECLEPLNKSNNIYAVGINCAPPQFIENLIRKFAKLTKKAIVVYPNSGEVWDGKAKQWLPSQCFGDDEFEMFATKWRDLGAKLIGGCCRTTPSTINAISRDLKRR

SEQ ID NO: 33338 - protein, 267 aa, Arabidopsis thaliana
  misc_feature (1)..(267): Ceres Seq. ID no. 13602774
MEYLEAGADIVVTSSYQATIPGFLSRGLSIEESESLLQKSVELAVEARDRFWEKVSKVSGHSYNRALVAASIGSYGAYLADGSEYSGHYGENVSLDKLKDFHRRRLQVLVEAGPDLLAFETIPNKLEAQACVELLEEEKVQIPAWICFTSVDGEKAPSGESFEECLEPLNKSNNIYAVGINCAPPQFIENLIRKFAKLTKKAIVVYPNSGEVWDGKAKQWLPSQCFGDDEFEMFATKWRDLGAKLIGGCCRTTPSTINAISRDLKRR

SEQ ID NO: 33339 - DNA, 1615 bp, Arabidopsis thaliana
  misc_feature (1)..(1615): Ceres Seq. ID no. 13602786
agaattgcttctcttagtatttgctttcaccaacccactcgacggagtctccaacgccttcctcctcattctccactctcacaccaccaacttctgattccagatctcaacgatgcaaagctccgccgtattctccctctctccgtcgcttcctctcctaaaaccacgtcggctctctctccgccaccatcccataaccaccgccgcttcttcaagcgatctaaacgtttctccaaatgttgtctctattccttctttatctcgtcgatcttggcgtctcgcttcgtctgattcgcctctccgtgcttggtccggtgttccttctccgatctctcactccttagacacgaatcgtttcagaaccgccgctactgcagttcctgaaagtgctgaggaaggtgataacagtggtaaattgacgaaggttttggaacttggcttgttgttcgctatgtggtaccttttcaatatctacttcaacatctacaataaacaggttttgaaagctctacatgctccaatgactgtgactttggttcagtttgctgttggtagtgtgctcattactatcatgtgggttcttaacctgtacaagagaccaaagatcagtggtgctcagctagctgccatcttgccgcttgctgttgtgcacacacttggtaatctgtttacgaacatgagtcttgggaaagtttctgtttcctttactcacaccattaaagccatggagcctttcttctctgttttattgtctgctatgtttctcggggagaaacctactccatgggtactcggtgccattgtaccaattgttggtggagttgcacttgcttcaatttcggaggtctcattcaactgggctggattttcgagtgcaatggcatcaaacttgactaaccaatcccgtaatgtgctgagtaagaaagtcatggttaagaaagatgattctcttgacaacatcactctcttctcaattataacattgatgtctctcgttctgatggctcctgtgactttctttacggaaggcatcaagttcactccttcatacattcaatcagctggtgtgaatgttaaacaaatatatacaaagtctcttatcgctgcactctgcttccacgcataccagcaggtgtcgtacatgatattggcgagagtatcaccggttacacattctgtcggaaactgtgtgaaacgtgttgtggttattgtgagctctgtcatcttcttcaagacacccgtctcgcctgttaatgctttcggaactggaatcgcccttgcgggtgtcttcttatactccagagtgaagggtattaagccaaagccaaagactgcttaagcaaatatcggctaatacctaatgtcatatcactcccgcgctttggatttgtatacaatttctcgagctaaagttttcagatagatggttttattcttttgcgggttttttcacgaagtttcatcatccctttctaagcttttcgctgcagccatcggttctcttagagtttgttataagttctcttctgtgtctagacaaatgctaaactcttaaatttcttacagtttttccaagaataacttgtcaacacattctcattactgcttttagttt

SEQ ID NO: 33340 - protein, 408 aa, Arabidopsis thaliana
  misc_feature (1)..(408): Ceres Seq. ID no. 13602787
MQSSAVFSLSPSLPLLKPRRLSLRHHPITTAASSSDLNVSPNVVSIPSLSRRSWRLASSDSPLRAWSGVPSPISHSLDTNRFRTAATAVPESAEEGDNSGKLTKVLELGLLFAMWYLFNIYFNIYNKQVLKALHAPMTVTLVQFAVGSVLITIMWVLNLYKRPKISGAQLAAILPLAVVHTLGNLFTNMSLGKVSVSFTHTIKAMEPFFSVLLSAMFLGEKPTPWVLGAIVPIVGGVALASISEVSFNWAGFSSAMASNLTNQSRNVLSKKVMVKKDDSLDNITLFSIITLMSLVLMAPVTFFTEGIKFTPSYIQSAGVNVKQIYTKSLIAALCFHAYQQVSYMILARVSPVTHSVGNCVKRVVVIVSSVIFFKTPVSPVNAFGTGIALAGVFLYSRVKGIKPKPKTA

SEQ ID NO: 33341 - protein, 295 aa, Arabidopsis thaliana
  misc_feature (1)..(295): Ceres Seq. ID no. 13602788
MWYLFNIYFNIYNKQVLKALHAPMTVTLVQFAVGSVLITIMWVLNLYKRPKISGAQLAAILPLAVVHTLGNLFTNMSLGKVSVSFTHTIKAMEPFFSVLLSAMFLGEKPTPWVLGAIVPIVGGVALASISEVSFNWAGFSSAMASNLTNQSRNVLSKKVMVKKDDSLDNITLFSIITLMSLVLMAPVTFFTEGIKFTPSYIQSAGVNVKQIYTKSLIAALCFHAYQQVSYMILARVSPVTHSVGNCVKRVVVIVSSVIFFKTPVSPVNAFGTGIALAGVFLYSRVKGIKPKPKTA

SEQ ID NO: 33342 - protein, 272 aa, Arabidopsis thaliana
  misc_feature (1)..(272): Ceres Seq. ID no. 13602789
MTVTLVQFAVGSVLITIMWVLNLYKRPKISGAQLAAILPLAVVHTLGNLFTNMSLGKVSVSFTHTIKAMEPFFSVLLSAMFLGEKPTPWVLGAIVPIVGGVALASISEVSFNWAGFSSAMASNLTNQSRNVLSKKVMVKKDDSLDNITLFSIITLMSLVLMAPVTFFTEGIKFTPSYIQSAGVNVKQIYTKSLIAALCFHAYQQVSYMILARVSPVTHSVGNCVKRVVVIVSSVIFFKTPVSPVNAFGTGIALAGVFLYSRVKGIKPKPKTA

SEQ ID NO: 33343 - DNA, 1392 bp, Arabidopsis thaliana
  misc_feature (1)..(1392): Ceres Seq. ID no. 13602790
acattctcatttcatagcaaaacaccaaaacagagttcacagaaacatattcaaagatttttcacaaatattaccattttaaatctataaacaatgacgaactcggtggctaagttggcactactagggttttgcattctgcaagtgacgagcttacttgttccgcaagcaaatgctagggctttccttgtgtttggagattctctcgttgacaatggtaacaatgactttcttgctaccactgctcgtgccgataattacccttatggtatcgatttcccaactcatcgtcctacgggccgtttctccaatggtctaaacattccagatctcatcagtgaacatttgggtcaagagtctccaatgccgtaccttagtccaatgctgaagaaggacaaactcttaaggggagctaacttcgcctccgcgggtattggaatccttaacgacaccggaatccagtttctgaatattattaggatcacaaagcagctagagtacttcgagcagtacaaggttcgagtaagcgggttggtcggagaagaagagatgaatcggctcgtgaacggagctcttgtcctaataacacttggaggcaatgatttcgtcaacaactactacttggtccctttctctgcaagatctcgtcaattctctcttcctgactacgttgtctttgtcatttctgaataccgcaaagtcttacggaaaatgtacgatttgggtgctcgacgtgtccttgtgactggaacaggaccaatgggttgcgtcccggccgagctggcgcaacgtagccgcaacggcgagtgtgctaccgaactccaacgagccgcgtcactattcaacccacaactaattcaaatgataacagacctcaacaacgaagttggatcttcggccttcattgccgctaatactcaacaaatgcacatggacttcattagcgacccacaagcatatggattcgtcacgtcgaaggtggcttgttgtggacaagggccgtacaatgggatagggctatgcactccattatcaaatctttgcccaaacagagatctctttgccttttgggatccttttcacccatcagaaaaagcaagtagaatcatagctcaacaaatcctcaatggctctcctgaatacatgcatcccatgaatcttagcaccatcctcaccgttgattccatgacctaagcttctattcctcatctatcccaaatccactttatgctttgtttttgttttgcctttctcgtttattatatatttttacattggcactttaattagtttccttgagttatgttgtgagttttgtgttgttcatcaataattagtcaccaattgtgagctgagaagtaatattcaacaatcttacgaatgttcactatc

SEQ ID NO: 33344 - protein, 366 aa, Arabidopsis thaliana
  misc_feature (1)..(366): Ceres Seq. ID no. 13602791
MTNSVAKLALLGFCILQVTSLLVPQANARAFLVFGDSLVDNGNNDFLATTARADNYPYGIDFPTHRPTGRFSNGLNIPDLISEHLGQESPMPYLSPMLKKDKLLRGANFASAGIGILNDTGIQFLNIIRITKQLEYFEQYKVRVSGLVGEEEMNRLVNGALVLITLGGNDFVNNYYLVPFSARSRQFSLPDYVVFVISEYRKVLRKMYDLGARRVLVTGTGPMGCVPAELAQRSRNGECATELQRAASLFNPQLIQMITDLNNEVGSSAFIAANTQQMHMDFISDPQAYGFVTSKVACCGQGPYNGIGLCTPLSNLCPNRDLFAFWDPFHPSEKASRIIAQQILNGSPEYMHPMNLSTILTVDSMT

SEQ ID NO: 33345 - protein, 276 aa, Arabidopsis thaliana
  misc_feature (1)..(276): Ceres Seq. ID no. 13602792
MPYLSPMLKKDKLLRGANFASAGIGILNDTGIQFLNIIRITKQLEYFEQYKVRVSGLVGEEEMNRLVNGALVLITLGGNDFVNNYYLVPFSARSRQFSLPDYVVFVISEYRKVLRKMYDLGARRVLVTGTGPMGCVPAELAQRSRNGECATELQRAASLFNPQLIQMITDLNNEVGSSAFIAANTQQMHMDFISDPQAYGFVTSKVACCGQGPYNGIGLCTPLSNLCPNRDLFAFWDPFHPSEKASRIIAQQILNGSPEYMHPMNLSTILTVDSMT

SEQ ID NO: 33346 - protein, 270 aa, Arabidopsis thaliana
  misc_feature (1)..(270): Ceres Seq. ID no. 13602793
MLKKDKLLRGANFASAGIGILNDTGIQFLNIIRITKQLEYFEQYKVRVSGLVGEEEMNRLVNGALVLITLGGNDFVNNYYLVPFSARSRQFSLPDYVVFVISEYRKVLRKMYDLGARRVLVTGTGPMGCVPAELAQRSRNGECATELQRAASLFNPQLIQMITDLNNEVGSSAFIAANTQQMHMDFISDPQAYGFVTSKVACCGQGPYNGIGLCTPLSNLCPNRDLFAFWDPFHPSEKASRIIAQQILNGSPEYMHPMNLSTILTVDSMT

SEQ ID NO: 33347 - DNA, 1131 bp, Arabidopsis thaliana
  misc_feature (1)..(1131): Ceres Seq. ID no. 13602805
tttttgaatttggttttatatataacaatctggatccgccaccgtcgaattaatctccggaaagctcgtcgaaagatgtcgatgggaggcgacacgacgtgggttgggaagaagccgatcagacgcatcggtggattatctgatgctctctctatcgcctccgatctcggtttcgccgtcgctcctcctccgtcgcaggaagaattacaaagctttgcgtcttcgaatggggaaagaggtgatgatttgataagggtattgagagagttatctgttgttcaaaggaaaattgcagacttgcaggtcgagcttcaagggaggaaggatgataaaaatgtggcgcatttgactcatgttggtgaaatgcaaaagaaaatcgagactttgtcaaggattactcaaatattgaaagatgttatacaaaacaaggatcgcatcattgctcgtctccaacaaccttattcgctagattgcattccagttgaagcagaatatcagaaacaattctcagagttgctaatgaaagccgccagtgattatggcgccttaacagcatccgtgtctgattttcagtggagccaaaactttaaagaacctccttcagtctggggggaaatgctgcgtccaatacctgtggcactagcgtcatgcacgagattctttgaggccatgtctgcgatgagagaatcattcgcgactcttcaagagcttcgagttggtaactctgcagtttctttaccaacaacaccaggaggtaacgaaatgacacatagagactcagattgtgtgactccacctcaagggaggatagagtcaagcttcgacgatttagctgttcataaaacaaggagacaaaacaatgatcaaaatgaagaagaagaagaagaagaagaagaagaagatggtaataacaatgggaaccggagactatcttggcctccttctgtaaaaaagagtagcgtttaaacagttgcttttgtctttgcttgagctttttaatatcgatcgtgttttgtttcatcagcattagtgttctttatggatttacttatttctatttgatagtctttgagtgaaacttaaaacagtgtatattttgttaacactggttttcatggtccatgtgactat

SEQ ID NO: 33348 - protein, 321 aa, Arabidopsis thaliana
  misc_feature (1)..(321): Ceres Seq. ID no. 13602806
FLNLVLYITIWIRHRRINLRKARRKMSMGGDTTWVGKKPIRRIGGLSDALSIASDLGFAVAPPPSQEELQSFASSNGERGDDLIRVLRELSVVQRKIADLQVELQGRKDDKNVAHLTHVGEMQKKIETLSRITQILKDVIQNKDRIIARLQQPYSLDCIPVEAEYQKQFSELLMKAASDYGALTASVSDFQWSQNFKEPPSVWGEMLRPIPVALASCTRFFEAMSAMRESFATLQELRVGNSAVSLPTTPGGNEMTHRDSDCVTPPQGRIESSFDDLAVHKTRRQNNDQNEEEEEEEEEEDGNNNGNRRLSWPPSVKKSSV

SEQ ID NO: 33349 - protein, 296 aa, Arabidopsis thaliana
  misc_feature (1)..(296): Ceres Seq. ID no. 13602807
MSMGGDTTWVGKKPIRRIGGLSDALSIASDLGFAVAPPPSQEELQSFASSNGERGDDLIRVLRELSVVQRKIADLQVELQGRKDDKNVAHLTHVGEMQKKIETLSRITQILKDVIQNKDRIIARLQQPYSLDCIPVEAEYQKQFSELLMKAASDYGALTASVSDFQWSQNFKEPPSVWGEMLRPIPVALASCTRFFEAMSAMRESFATLQELRVGNSAVSLPTTPGGNEMTHRDSDCVTPPQGRIESSFDDLAVHKTRRQNNDQNEEEEEEEEEEDGNNNGNRRLSWPPSVKKSSV

SEQ ID NO: 33350 - protein, 294 aa, Arabidopsis thaliana
  misc_feature (1)..(294): Ceres Seq. ID no. 13602808
MGGDTTWVGKKPIRRIGGLSDALSIASDLGFAVAPPPSQEELQSFASSNGERGDDLIRVLRELSVVQRKIADLQVELQGRKDDKNVAHLTHVGEMQKKIETLSRITQILKDVIQNKDRIIARLQQPYSLDCIPVEAEYQKQFSELLMKAASDYGALTASVSDFQWSQNFKEPPSVWGEMLRPIPVALASCTRFFEAMSAMRESFATLQELRVGNSAVSLPTTPGGNEMTHRDSDCVTPPQGRIESSFDDLAVHKTRRQNNDQNEEEEEEEEEEDGNNNGNRRLSWPPSVKKSSV

SEQ ID NO: 33351 - DNA, 1475 bp, Arabidopsis thaliana
  misc_feature (1)..(1475): Ceres Seq. ID no. 13602817
aaaaagttgcgaagctctctcattgagtaaactaacggctatattctctctgatattcaaaatttgctcgaagaaacgacgatggcagccgaaacgaaggttcaggtttcagatccagaggcagagtttcttaattcgaagcaggagactggatacgagtgggagcttttcaaggagaacgtccggccattgaagagaggtcgcaatgttggtattctcaaccacgctctcaaatctcactctgaccaccaattgagaaagaatctcatcgagaaacgcaggaatttgattgaagccattgatgagtatgaaggagatgaccctttatctccatggatagagtgtataaaatgggtacaagaggcttttccaccaggaggagaatgttcaggactgttagtgatatatgagcaatgtgttcgtaaattttggcactctgaacgttacaaggatgatcttcgttatcttaaagtctggttggaatatgcggagcattgcgctgatgcggaagtgatttacaagtttttggaggtcaatgagattggaaagacacatgctgtctactatatagcttatgctttgcacattgagtttaagaataaggtcaaaactgctaatgagatcttcaatcttggaatctctagggatgcaaagccagtggaaaagttgaatgacgcgtacaagaagtttatggtgagaacgatgagaaggtccaacacagctgatgaagaaccaaaggagaataatgacttaccgtcaagaagctttggcactttattgtccaggggagataataatgcaagaaggcaggcgttaggaagttctaacccacaagccaaaaagctaaagccaaatcaatcatccaagacaccttttgctatctacgcagatgcagtttcagacaccacatcagggaatcaaccagagtcagacaagtcaagaccagagtttggtagttggctcatgcttggaggcagagcagagaggaacaaagaaaacaattctttacctagaaaatgggcatcattcaaggttcctcagaaacccattgtgagaactgttgcagcagcatctgcttccacctttgaggtttttgtcgatgaagaagaatgtacagaagaggaagaagaaaagaagaagaatgatgaaactatctcatcatcatcaaacgttctgccccttaatggcggccgtgagataaaaaaagaaacagagctgctacgacagaaccctttaagacatttcccacccaacagcttcctacgatgatgatattggactttcttctctacacgatcttatggtttgagatttgagcttttgtctataaagctccttgtgtgtttttgcctatttggatttgtttttgtgatgtactgggatatactatcctactatgtaccatgatgtgcctttcatgttttgaaattaatgtgacttgtcttgtttcaatccttatatgatttgtttctcct

SEQ ID NO: 33352 - protein, 395 aa, Arabidopsis thaliana
  misc_feature (1)..(395): Ceres Seq. ID no. 13602818
MAAETKVQVSDPEAEFLNSKQETGYEWELFKENVRPLKRGRNVGILNHALKSHSDHQLRKNLIEKRRNLIEAIDEYEGDDPLSPWIECIKWVQEAFPPGGECSGLLVIYEQCVRKFWHSERYKDDLRYLKVWLEYAEHCADAEVIYKFLEVNEIGKTHAVYYIAYALHIEFKNKVKTANEIFNLGISRDAKPVEKLNDAYKKFMVRTMRRSNTADEEPKENNDLPSRSFGTLLSRGDNNARRQALGSSNPQAKKLKPNQSSKTPFAIYADAVSDTTSGNQPESDKSRPEFGSWLMLGGRAERNKENNSLPRKWASFKVPQKPIVRTVAAASASTFEVFVDEEECTEEEEEKKKNDETISSSSNVLPLNGGREIKKETELLRQNPLRHFPPNSFLR

SEQ ID NO: 33353 - DNA, 1433 bp, Arabidopsis thaliana
  misc_feature (1)..(1433): Ceres Seq. ID no. 13602834
atataaactcgaatccatcacaaagcctattcaagttaagagaaaagaaaaaaaaaaccgttcttggaagatgggtttcaaactcaactctcttttccttcttctttcgcttctcatactcacaatcttgtccggagccgaccaagccttggcttacgtcaagaaaccacatgtgagccaacgcaacaaaacggcgttagcagccgtcgccggaagaggaggaggaaaagagatgttgaaagggaggaagcagacgagtggttgtaacttgtttcaagggagatgggttttcgatgcttcttaccctttctacgattcatccacgtgccctttcatcgacggtgagttcgactgtctcaaattcggccgaccagacaaacagttccttaagtactcttggcagcctgattcatgcaccgtcccaaggtttgatggggaagcgtttttgaagaaatggagagggaaacgagtgatgttcgtgggtgactcactgagtctaaacatgtgggaatcgttggcatgtatgatacattcgtcggttccaaacactaagaccacttttctcaagcgaaccccactctcctctctcactttccaggaatatgacgtcacactattcctataccgaacaccatacctagtggacatctccaaagaaagtgtcgggcgtgtgcttaaccttggagccattgaagatggagctgatgcttggaaaaatatggacctcctcgtcttcaattcttggcactggtggactcacacaggagtacagtctcaagggtgggattttataagagatgggtcttcactgatgagagacatggaccgccttgatgctttcaacaaaggactcaccacttggggtcaatgggttgatcaaaatgttaatgtttcgcaaacccgagtcttcttccaaggcatttctcccactcactacatgggaagggaatggaacgagccgaggaaaacttgcaacgggcagatgcaaccgttgaccggatcaacatacccaggtggttcacttcctgcagcaagcattgtgtctcgagtattaagcacgatgagaacgcccgtttacttactcgacatcacaactctatctcaactgagaaaagatgctcatccatctacatatggaggcgatggcggaacggattgcagtcactggtgccttcctggcttgccggatacttggaaccagcttctctatgcagctctttcgatgtgaaagcttgactcaatacacacttgcatgtatattacattcttggcagtccaaaggggaaaaaaagaagaagaaacgactgacattttacttggagagaatttgaagattagaaagagtatatgacgataaagttgtaaagtgttttatattctttactcttgggtggttacaaatcataatctaatcgacttcgattgtgattacc

SEQ ID NO: 33354 - protein, 408 aa, Arabidopsis thaliana
  misc_feature (1)..(408): Ceres Seq. ID no. 13602835
YKLESITKPIQVKRKEKKNRSWKMGFKLNSLFLLLSLLILTILSGADQALAYVKKPHVSQRNKTALAAVAGRGGGKEMLKGRKQTSGCNLFQGRWVFDASYPFYDSSTCPFIDGEFDCLKFGRPDKQFLKYSWQPDSCTVPRFDGEAFLKKWRGKRVMFVGDSLSLNMWESLACMIHSSVPNTKTTFLKRTPLSSLTFQEYDVTLFLYRTPYLVDISKESVGRVLNLGAIEDGADAWKNMDLLVFNSWHWWTHTGVQSQGWDFIRDGSSLMRDMDRLDAFNKGLTTWGQWVDQNVNVSQTRVFFQGISPTHYMGREWNEPRKTCNGQMQPLTGSTYPGGSLPAASIVSRVLSTMRTPVYLLDITTLSQLRKDAHPSTYGGDGGTDCSHWCLPGLPDTWNQLLYAALSM

SEQ ID NO: 33355 - protein, 385 aa, Arabidopsis thaliana
  misc_feature (1)..(385): Ceres Seq. ID no. 13602836
MGFKLNSLFLLLSLLILTILSGADQALAYVKKPHVSQRNKTALAAVAGRGGGKEMLKGRKQTSGCNLFQGRWVFDASYPFYDSSTCPFIDGEFDCLKFGRPDKQFLKYSWQPDSCTVPRFDGEAFLKKWRGKRVMFVGDSLSLNMWESLACMIHSSVPNTKTTFLKRTPLSSLTFQEYDVTLFLYRTPYLVDISKESVGRVLNLGAIEDGADAWKNMDLLVFNSWHWWTHTGVQSQGWDFIRDGSSLMRDMDRLDAFNKGLTTWGQWVDQNVNVSQTRVFFQGISPTHYMGREWNEPRKTCNGQMQPLTGSTYPGGSLPAASIVSRVLSTMRTPVYLLDITTLSQLRKDAHPSTYGGDGGTDCSHWCLPGLPDTWNQLLYAALSM

SEQ ID NO: 33356 - protein, 331 aa, Arabidopsis thaliana
  misc_feature (1)..(331): Ceres Seq. ID no. 13602837
MLKGRKQTSGCNLFQGRWVFDASYPFYDSSTCPFIDGEFDCLKFGRPDKQFLKYSWQPDSCTVPRFDGEAFLKKWRGKRVMFVGDSLSLNMWESLACMIHSSVPNTKTTFLKRTPLSSLTFQEYDVTLFLYRTPYLVDISKESVGRVLNLGAIEDGADAWKNMDLLVFNSWHWWTHTGVQSQGWDFIRDGSSLMRDMDRLDAFNKGLTTWGQWVDQNVNVSQTRVFFQGISPTHYMGREWNEPRKTCNGQMQPLTGSTYPGGSLPAASIVSRVLSTMRTPVYLLDITTLSQLRKDAHPSTYGGDGGTDCSHWCLPGLPDTWNQLLYAALSM

SEQ ID NO: 33357 - DNA, 702 bp, Arabidopsis thaliana
  misc_feature (1)..(702): Ceres Seq. ID no. 13602838
aggttaagatcattttgagtctctccaaaccctaatatcaaattctcatctcataactaacaaaagcatcccaaaatttctagtaaatggcggaggaattcgatgaatctgaggtagtgttctccgatggtttaagctccgttctccataaagagaacgagaatcgcctgtttggttctgatatggagaggaagaagacgaggcggatcaagaggacgacgacggagaaggcgtcgttgtcgagctcgcttccggtgagtatccctgagaacatctttcggaggtacgttgggaaagaggaggatgaatactcagaggaggaatattccgaaggaggaggagagatgattccgccgcatattatgatcggacggaggatccaaggaggacaaatggcgttttccgtttgttcaggtagtggaaggactcttaagggaagagatctgagccgggttcggaattcggttcttaggttaaccggttttttggaggcttgaaccgttaccggtttgccatacttcatcatcttttcccaactcttttgtttttttgcatattacggaaaattgctagtggatccccgtgttgtttatttaagtaaagggtggggaaaatgtgaaacaaagctttctccttagtttttgtttttccatattcttttgtttttcctaaattgtaataggaaacaaggaaatttcgggt

SEQ ID NO: 33358 - protein, 136 aa, Arabidopsis thaliana
  misc_feature (1)..(136): Ceres Seq. ID no. 13602839
MAEEFDESEVVFSDGLSSVLHKENENRLFGSDMERKKTRRIKRTTTEKASLSSSLPVSIPENIFRRYVGKEEDEYSEEEYSEGGGEMIPPHIMIGRRIQGGQMAFSVCSGSGRTLKGRDLSRVRNSVLRLTGFLEA

SEQ ID NO: 33359 - protein, 104 aa, Arabidopsis thaliana
  misc_feature (1)..(104): Ceres Seq. ID no. 13602840
MERKKTRRIKRTTTEKASLSSSLPVSIPENIFRRYVGKEEDEYSEEEYSEGGGEMIPPHIMIGRRIQGGQMAFSVCSGSGRTLKGRDLSRVRNSVLRLTGFLEA

SEQ ID NO: 33360 - DNA, 675 bp, Arabidopsis thaliana
  misc_feature (1)..(675): Ceres Seq. ID no. 13602844
agcgaacgaaagttcgattccgagaaagtgagagaaaatgacgaagagagctcccaagtcagggcctttgtctccgtcgtgcagcggaggctctagtcggaacttagagttggctgtgaagtcaagtgaaggtgcaaggaggtctacaagactgagacttcagcctttgagaaagccaaagacaagccccaagaagaaacccgttaaactccaaacgaagatgcccaagaaacctgccactgctttcttctttttcctggatgatttccggaagcaatatcaagaggagaatccagatgtcaagtccatgcgcgagattgggaagacatgtggagagaaatggaaaacaatgacttacgaggaaaaggtaaagtattatgatatagctactgagaagagggaagaatttcaccgagcaatgacagaatataccaagagaatggaatcaggtgcccacgatgaatcagagaccgactcagactattctgaatagattactttttagtttctaccacattagaaacattgttctaagccttctaggatgggtttgtatatcggtgatatttaagagtttctgtttcgtttttgagatcattctttcactgatactcatgtttctgtggattgcatttggagatcaatgaatactaaccagtttcttgagtggttgcc

SEQ ID NO: 33361 - protein, 151 aa, Arabidopsis thaliana
  misc_feature (1)..(151): Ceres Seq. ID no. 13602845
MTKRAPKSGPLSPSCSGGSSRNLELAVKSSEGARRSTRLRLQPLRKPKTSPKKKPVKLQTKMPKKPATAFFFFLDDFRKQYQEENPDVKSMREIGKTCGEKWKTMTYEEKVKYYDIATEKREEFHRAMTEYTKRMESGAHDESETDSDYSE

SEQ ID NO: 33362 - protein, 90 aa, Arabidopsis thaliana
  misc_feature (1)..(90): Ceres Seq. ID no. 13602846
MPKKPATAFFFFLDDFRKQYQEENPDVKSMREIGKTCGEKWKTMTYEEKVKYYDIATEKREEFHRAMTEYTKRMESGAHDESETDSDYSE

SEQ ID NO: 33363 - DNA, 1458 bp, Arabidopsis thaliana
  misc_feature (1)..(1458): Ceres Seq. ID no. 13602851
aaagtattattccgaatgtaaatagtggaacaaaaagaacagctgggaggattttgtttaaaaggacactacacttcccagctttccctcactgcccgaaaagaacactgcagaaacactttcctctgttcacagagaaagagagagatgatgctttacagcaacaatagttggagatcgaattccattttaatacttctacttggtctctccattgtggccgccgcagactccgccggcaaaacttcaccggtcgaagacggcttggtggttaacggcgactttgagacaccgccgtcaaacggcttccctgatgacgcaatcatcgaggacacctccgagatcccgagctggcgatccgatggtacggtggagctaatcaagtccggtcaaaaacaaggcgggatgatcttgatcgtgcctgagggccgtcacgctgttagattaggaaacgatgcagagatcagccaagaacttacggtggagaaaggctctatctactccgtcacgttcagtgcagcccgcacatgtgcacaactcgagtcgctgaatgtttcggtagcttcttctgatgaacctatcgcatcgcaaaccattgacttgcaaacggtgtacagcgttcaaggatgggatccatatgcatgggcgtttgaagcggttgtggatcgcgtccggttggtttttaagaaccctggcatggaggatgatcctacttgtggacctatcattgacgacattgccgttaagaagctctttactcctgataaacccaaaggcaatgcagtgattaatggagattttgaagaaggtccatggatgtttaggaacactaccttaggtgttctgcttccaacaaacctcgatgaagaaatatcgtctcttcctggatggaccgtcgaatcgaaccgagcagtacggtttattgactcagaccatttctcggtccccgaggggaagcgagctttggaacttttatcgggcaaagaaggcataatttctcaaatggttgagacaaaggcgaacattccgtacaagatgtctttctctttgggacacgcaggggacaagtgtaaggaacctttggctgtaatggcttttgctggagatcaagcacagaactttcattatatggcgcaagcaaactcgagtttcgaaagatcggagttgaacttcactgcgaaagctgaacgtacgaggatcgccttctacagcatttattacaatacgaggacggacgatatgacttcattgtgtggacctgtgattgatgacgttaaggtttggttctccgggtctagtagaattggatttagttttccgctttttattcttctttctttggttttcatctagattgttccggttcagaaattgtattggtagaccgggaattaagacgggattccacgttgtatgatgtatcgttgtatgatggatcggttcaaggtacaagaaatg

SEQ ID NO: 33364 - protein, 401 aa, Arabidopsis thaliana
  misc_feature (1)..(401): Ceres Seq. ID no. 13602852
MMLYSNNSWRSNSILILLLGLSIVAAADSAGKTSPVEDGLVVNGDFETPPSNGFPDDAIIEDTSEIPSWRSDGTVELIKSGQKQGGMILIVPEGRHAVRLGNDAEISQELTVEKGSIYSVTFSAARTCAQLESLNVSVASSDEPIASQTIDLQTVYSVQGWDPYAWAFEAVVDRVRLVFKNPGMEDDPTCGPIIDDIAVKKLFTPDKPKGNAVINGDFEEGPWMFRNTTLGVLLPTNLDEEISSLPGWTVESNRAVRFIDSDHFSVPEGKRALELLSGKEGIISQMVETKANIPYKMSFSLGHAGDKCKEPLAVMAFAGDQAQNFHYMAQANSSFERSELNFTAKAERTRIAFYSIYYNTRTDDMTSLCGPVIDDVKVWFSGSSRIGFSFPLFILLSLVFI

SEQ ID NO: 33365 - protein, 400 aa, Arabidopsis thaliana
  misc_feature (1)..(400): Ceres Seq. ID no. 13602853
MLYSNNSWRSNSILILLLGLSIVAAADSAGKTSPVEDGLVVNGDFETPPSNGFPDDAIIEDTSEIPSWRSDGTVELIKSGQKQGGMILIVPEGRHAVRLGNDAEISQELTVEKGSIYSVTFSAARTCAQLESLNVSVASSDEPIASQTIDLQTVYSVQGWDPYAWAFEAVVDRVRLVFKNPGMEDDPTCGPIIDDIAVKKLFTPDKPKGNAVINGDFEEGPWMFRNTTLGVLLPTNLDEEISSLPGWTVESNRAVRFIDSDHFSVPEGKRALELLSGKEGIISQMVETKANIPYKMSFSLGHAGDKCKEPLAVMAFAGDQAQNFHYMAQANSSFERSELNFTAKAERTRIAFYSIYYNTRTDDMTSLCGPVIDDVKVWFSGSSRIGFSFPLFILLSLVFI

SEQ ID NO: 33366 - protein, 315 aa, Arabidopsis thaliana
  misc_feature (1)..(315): Ceres Seq. ID no. 13602854
MILIVPEGRHAVRLGNDAEISQELTVEKGSIYSVTFSAARTCAQLESLNVSVASSDEPIASQTIDLQTVYSVQGWDPYAWAFEAVVDRVRLVFKNPGMEDDPTCGPIIDDIAVKKLFTPDKPKGNAVINGDFEEGPWMFRNTTLGVLLPTNLDEEISSLPGWTVESNRAVRFIDSDHFSVPEGKRALELLSGKEGIISQMVETKANIPYKMSFSLGHAGDKCKEPLAVMAFAGDQAQNFHYMAQANSSFERSELNFTAKAERTRIAFYSIYYNTRTDDMTSLCGPVIDDVKVWFSGSSRIGFSFPLFILLSLVFI

SEQ ID NO: 33367 - DNA, 1094 bp, Arabidopsis thaliana
  misc_feature (1)..(1094): Ceres Seq. ID no. 13602855
gtttatctccaccgaacaagaaaaaaaactaaaaccctaattccagcgncgtcttcgcgctctgagaaaaatcgcagagtagagactagaaggagaagaagatgagagtgaagaggcagaagaaaaacaggagaaccgtgagattcttcacggtctgttacggattccgtcaaccctacaaagtcctttgcgacggcactttcgtccaccatcttgtcactaatgagatcactcccgccgacactgctgtctctgaactcctcggaggtcccgtcaagctcttcaccaccagatgtgtgattgcggagttggagaaactgggtaaagattttgcggaatctctcgaagctgcccagacgcttaatacagcaacatgtgagcacgaggaggcaaaaacagcagacgagtgtttgtcagaggtaataggggtacaaaatactgagcatttcttccttggtactcaggacgcggagtttaggagaaagcttcagcaggagtctatagttcctcttgtgtttggtctaaggaacatactgctgattgatcaaccttctgatttccaacgtcagagtgccaaagactctgaaaataagcgcttaactatgaccgatacggaaaaaaagttgttggtgaaacggactgcgaaaatcatagcttctaatagaaaagaagcaacaattgcaaatgaagaatggggaatgcctcgagtagtttctacaaaaaatggacttggtgtgaaggatagacctcagttcaagcgaaatagagccaagggtccaaacccactttcatgcatgaagaaaaagaaggagaatcctcaatccaaatccaaagccgattctaactctaatgcacaaaaggaaaagaaagaaggcgggagcgatacacaaaagaggtcaagaaaacggtcaaaaaaaggaaagtctggtccggagagaaccgagtgaaaacagttgttttatatataacacatcttgagtccttactttttctactgcatacaaaaattttggtcaccaatcagactagagcttgagtctcattgctgttatactctcattttatttcaagcaaagacgacccgtgtaacagag

SEQ ID NO: 33368 - protein, 281 aa, Arabidopsis thaliana
  misc_feature (1)..(281): Ceres Seq. ID no. 13602856
MRVKRQKKNRRTVRFFTVCYGFRQPYKVLCDGTFVHHLVTNEITPADTAVSELLGGPVKLFTTRCVIAELEKLGKDFAESLEAAQTLNTATCEHEEAKTADECLSEVIGVQNTEHFFLGTQDAEFRRKLQQESIVPLVFGLRNILLIDQPSDFQRQSAKDSENKRLTMTDTEKKLLVKRTAKIIASNRKEATIANEEWGMPRVVSTKNGLGVKDRPQFKRNRAKGPNPLSCMKKKKENPQSKSKADSNSNAQKEKKEGGSDTQKRSRKRSKKGKSGPERTE

SEQ ID NO: 33369 - DNA, 746 bp, Arabidopsis thaliana
  misc_feature (1)..(746): Ceres Seq. ID no. 13602891
gccataaactttagaaaagagagagagagacaaagagagatctgatcctttgaagaaacaacaccaaaaaaaaaaaaaaaagaatggcatcagcggatgaaaaggtggtggaagagaaggcttcggtgatttcaagcttgttggacaaagccaaaggtttctttgcggagaagctggcgaatattccgacgccggaagcaaccgtggacgacgttgatttcaaaggcgtgacacgtgatggagtagattatcacgccaaggtctccgtcaagaatccttactctcaatccatccctatctgccagatctcttacatcctcaagagtgccacaaggacgatcgcgtcaggcacgataccggacccgggttcgttggttgggagcggcacgacggttctggacgtaccggttaaggtggcttatagcatagcggttagtctgatgaaggatatgtgtacggactgggacattgactatcaactagacattgggctaaccttcgacattcctgttgttggtgatatcaccattcctgtctctactcagggagagatcaagctcccttcccttcgcgacttcttttaattaccttatttcaaatatagttttcttaaatcataatctaattttcaataatgtacgatccataaacatagacgatcggagattaatacatttctggaatcctttttttattttgttgatttcaacaaggattttattggttattaattatgtatgtttttc

SEQ ID NO: 33370 - protein, 166 aa, Arabidopsis thaliana
  misc_feature (1)..(166): Ceres Seq. ID no. 13602892
MASADEKVVEEKASVISSLLDKAKGFFAEKLANIPTPEATVDDVDFKGVTRDGVDYHAKVSVKNPYSQSIPICQISYILKSATRTIASGTIPDPGSLVGSGTTVLDVPVKVAYSIAVSLMKDMCTDWDIDYQLDIGLTFDIPVVGDITIPVSTQGEIKLPSLRDFF

SEQ ID NO: 33371 - DNA, 1370 bp, Arabidopsis thaliana
  misc_feature (1)..(1370): Ceres Seq. ID no. 13602929
aaatagctttcttcttttggccccttacccagagatagattcttatatactactgagaatcttcaatttctgcaacttttgtatctcttcctgatggagtcttcaagtccccaccatagtcacattgttgaggttaatgttggaaaatctgatgaagagagaataattgtggcgagtaaagtctgtggagaagcaccatgtgggttttcagattctaagaatgcttccggggatgctcacgaacgctctgcttctatgcggaagctttgtatcgccgtcgtgctgtgtctagtgttcatgagtgttgaagttgttggtgggattaaagccaatagtttagctatattaaccgatgcagctcatttgctctctgacgttgctgcctttgctatctccctcttctcattgtgggctgctggctgggaagcgactcctaggcagacttacgggttcttcaggattgagattttgggtgctcttgtatctatccagctcatttggttgctcacgggtattctggtttatgaagcgattatcagaattgttacagagaccagtgaggttaatggattcctcatgtttctggttgctgcctttggtctagtggtgaacatcataatggctgttctgctagggcatgatcatggtcacagtcatggacatgggcatggccacggccatgaccatcacaatcatagccatggggtgactgttaccactcatcaccatcatcacgatcatgaacatggccatagtcatggtcatggagaggacaagcatcatgctcatggggatgttactgagcaattgttggacaaatcgaagactcaagtcgcagcaaaagagaaaagaaagagaaacatcaatctccaaggagcttatctgcatgtccttggggattccatccagagtgttggtgttatgattggaggagctatcatttggtacaatccggaatggaagatagtggatctgatctgcacacttgccttttcggttattgtcctaggaacaaccatcaacatgattcgcaacattctagaagtattgatggagagtacacccagagagattgacgccacaaagctcgaaaagggtttgctcgaaatggaagaagtggtggctgttcatgagctccacatatgggctatcacagtgggaaaagtgctattggcttgccatgtcaatatcagaccagaagcagatgcagatatggtgctcaacaaggtaattgattacatccgcagggagtacaacattagtcatgtcacgatacaaatcgagcgctaaaagctaagtaagatctgatgaagggtttttgtatcagcattctcattaacaataaaatcaataaagtttctacatttttc

SEQ ID NO: 33372 - protein, 398 aa, Arabidopsis thaliana
  misc_feature (1)..(398): Ceres Seq. ID no. 13602930
MESSSPHHSHIVEVNVGKSDEERIIVASKVCGEAPCGFSDSKNASGDAHERSASMRKLCIAVVLCLVFMSVEVVGGIKANSLAILTDAAHLLSDVAAFAISLFSLWAAGWEATPRQTYGFFRIEILGALVSIQLIWLLTGILVYEAIIRIVTETSEVNGFLMFLVAAFGLVVNIIMAVLLGHDHGHSHGHGHGHGHDHHNHSHGVTVTTHHHHHDHEHGHSHGHGEDKHHAHGDVTEQLLDKSKTQVAAKEKRKRNINLQGAYLHVLGDSIQSVGVMIGGAIIWYNPEWKIVDLICTLAFSVIVLGTTINMIRNILEVLMESTPREIDATKLEKGLLEMEEVVAVHELHIWAITVGKVLLACHVNIRPEADADMVLNKVIDYIRREYNISHVTIQIER

SEQ ID NO: 33373 - protein, 344 aa, Arabidopsis thaliana
  misc_feature (1)..(344): Ceres Seq. ID no. 13602931
MRKLCIAVVLCLVFMSVEVVGGIKANSLAILTDAAHLLSDVAAFAISLFSLWAAGWEATPRQTYGFFRIEILGALVSIQLIWLLTGILVYEAIIRIVTETSEVNGFLMFLVAAFGLVVNIIMAVLLGHDHGHSHGHGHGHGHDHHNHSHGVTVTTHHHHHDHEHGHSHGHGEDKHHAHGDVTEQLLDKSKTQVAAKEKRKRNINLQGAYLHVLGDSIQSVGVMIGGAIIWYNPEWKIVDLICTLAFSVIVLGTTINMIRNILEVLMESTPREIDATKLEKGLLEMEEVVAVHELHIWAITVGKVLLACHVNIRPEADADMVLNKVIDYIRREYNISHVTIQIER

SEQ ID NO: 33374 - protein, 330 aa, Arabidopsis thaliana
  misc_feature (1)..(330): Ceres Seq. ID no. 13602932
MSVEVVGGIKANSLAILTDAAHLLSDVAAFAISLFSLWAAGWEATPRQTYGFFRIEILGALVSIQLIWLLTGILVYEAIIRIVTETSEVNGFLMFLVAAFGLVVNIIMAVLLGHDHGHSHGHGHGHGHDHHNHSHGVTVTTHHHHHDHEHGHSHGHGEDKHHAHGDVTEQLLDKSKTQVAAKEKRKRNINLQGAYLHVLGDSIQSVGVMIGGAIIWYNPEWKIVDLICTLAFSVIVLGTTINMIRNILEVLMESTPREIDATKLEKGLLEMEEVVAVHELHIWAITVGKVLLACHVNIRPEADADMVLNKVIDYIRREYNISHVTIQIER

SEQ ID NO: 33375 - DNA, 1577 bp, Arabidopsis thaliana
  misc_feature (1)..(1577): Ceres Seq. ID no. 13602933
ctccagtttcatagtcactaacctaaaagaattaatggaggaaactcggaggaggtttgtcatatcctctgttctaagtgtttctttgatctacttatgtctttcgacatgtcacgtttccgccttcgacttcggtagaaggcagctccggtttaatactgatggtcggttcaagatactgcaagtgtcagatatgcactacggttttggcaaagagacgcaatgctcagacgtttcacctgcagaatttccttactgctccgatctcaatactacctcctttttacagcgaactatcgcttccgagaagcccgatctcatcgtcttctctggagacaatgtatatggattgtgcgagacaagtgacgtggcaaaatcgatggacatggcatttgctcctgcgatcgaatcggggattccatgggtggctattttggggaatcacgaccaagaatccgacatgactagagaaacaatgatgaaatacatcatgaaactcccaaactcgttgtctcaagtaaaccctcccgatgcttggctataccaaatcgacggttttggtaattacaatctacaaatcgagggtccttttggctcccctctcttcttcaaatccattctcaatctctatctactagacggtggatcttacacgaagcttgatggttttggttacaaatatgattgggtcaaaacctctcaacagaattggtatgaacacacttctaaatggcttgagatggaacacaagaggtggccatttccacagaatagtacggcaccaggattggtttacctccacattccgatgccggaatttgcattgttcaacaaatcgacggagatgactggagtaagacaagaatctacttgttctccacctatcaactctggtttctttaccaaacttgtcgaaagaggtgaagtcaaaggtgttttcagtggtcacgaccacgtcaacgacttctgtgccgaactccatgggatcaacctttgttacgcaggcggagccgggtatcatgggtacggacaggttggttgggcaaggagagtaagagtagttgaggctcagcttgagaagactatgtatggacgttggggagctgttgatacaatcaaaacttggaaacggctcgatgataagaatcattctttgattgatactcaacttctctggaccaagaacacaactcttgagccaaattttgggtttagttgctctactataccacaacactgatcattaagcagagttgttgtacaatgatatgatattttcattttctttatttatgctttactatctattattttgtttagaataagaattaaggaagacaatgtcagcttataattgtctgctttgtttagaataagaaggaagacaatgtcagcttataattgtctgctttgttacgttcgttttatttttctcaatagagtatcattttatctataaacatgagtcaatactcaatgggtacgctttggtaaagttaataatctcgggaaatgtttatagaagagtttataatgtaggattttctgagtgggaaatattggaagactggaatcgc

SEQ ID NO: 33376 - protein, 412 aa, Arabidopsis thaliana
  misc_feature (1)..(412): Ceres Seq. ID no. 13602934
SSFIVTNLKELMEETRRRFVISSVLSVSLIYLCLSTCHVSAFDFGRRQLRFNTDGRFKILQVSDMHYGFGKETQCSDVSPAEFPYCSDLNTTSFLQRTIASEKPDLIVFSGDNVYGLCETSDVAKSMDMAFAPAIESGIPWVAILGNHDQESDMTRETMMKYIMKLPNSLSQVNPPDAWLYQIDGFGNYNLQIEGPFGSPLFFKSILNLYLLDGGSYTKLDGFGYKYDWVKTSQQNWYEHTSKWLEMEHKRWPFPQNSTAPGLVYLHIPMPEFALFNKSTEMTGVRQESTCSPPINSGFFTKLVERGEVKGVFSGHDHVNDFCAELHGINLCYAGGAGYHGYGQVGWARRVRVVEAQLEKTMYGRWGAVDTIKTWKRLDDKNHSLIDTQLLWTKNTTLEPNFGFSCSTIPQH

SEQ ID NO: 33377 - protein, 401 aa, Arabidopsis thaliana
  misc_feature (1)..(401): Ceres Seq. ID no. 13602935
MEETRRRFVISSVLSVSLIYLCLSTCHVSAFDFGRRQLRFNTDGRFKILQVSDMHYGFGKETQCSDVSPAEFPYCSDLNTTSFLQRTIASEKPDLIVFSGDNVYGLCETSDVAKSMDMAFAPAIESGIPWVAILGNHDQESDMTRETMMKYIMKLPNSLSQVNPPDAWLYQIDGFGNYNLQIEGPFGSPLFFKSILNLYLLDGGSYTKLDGFGYKYDWVKTSQQNWYEHTSKWLEMEHKRWPFPQNSTAPGLVYLHIPMPEFALFNKSTEMTGVRQESTCSPPINSGFFTKLVERGEVKGVFSGHDHVNDFCAELHGINLCYAGGAGYHGYGQVGWARRVRVVEAQLEKTMYGRWGAVDTIKTWKRLDDKNHSLIDTQLLWTKNTTLEPNFGFSCSTIPQH

SEQ ID NO: 33378 - protein, 348 aa, Arabidopsis thaliana
  misc_feature (1)..(348): Ceres Seq. ID no. 13602936
MHYGFGKETQCSDVSPAEFPYCSDLNTTSFLQRTIASEKPDLIVFSGDNVYGLCETSDVAKSMDMAFAPAIESGIPWVAILGNHDQESDMTRETMMKYIMKLPNSLSQVNPPDAWLYQIDGFGNYNLQIEGPFGSPLFFKSILNLYLLDGGSYTKLDGFGYKYDWVKTSQQNWYEHTSKWLEMEHKRWPFPQNSTAPGLVYLHIPMPEFALFNKSTEMTGVRQESTCSPPINSGFFTKLVERGEVKGVFSGHDHVNDFCAELHGINLCYAGGAGYHGYGQVGWARRVRVVEAQLEKTMYGRWGAVDTIKTWKRLDDKNHSLIDTQLLWTKNTTLEPNFGFSCSTIPQH

SEQ ID NO: 33379 - DNA, 1032 bp, Arabidopsis thaliana
  misc_feature (1)..(1032): Ceres Seq. ID no. 13602937
agttctcagtttgtcaccatcctcgagcagcttttgagctttgaaggttcgaaaatggatcgaattgcgtctgcgactttctcttgccctgcgatttcattgtcccgcgtctgtagaatcagcccttttggcttaaacattaaaaccaaccatagaaagagattctcgtgtcgagtagctgtagcttctggagagacttcggccagggtcgtcgtcgacaatgaacttgacttagaacacaagaaacacgatctactgagagctgttcaagacactcaacgaggactcactgccacttctgatcaacgatctatcattgaggaggctctggtgactgtggaagggtttaatggcggtgaagaaattgatccagtgaagttagatggaacatggaggctacaatatacatctgcacctgatgttgttgttctgtttgaagctgcttcaagacttcccttctttcaggtagggcaggtctttcagaagtttgagtgcagagatagatccgacggtgggatcattcggaatgttgttcagtggagtcttccaagcttgttggaggagcaagaaggtgcaacacttgttgttaccgcgaaatttgataaggtctctagtcgaaacatctaccttcagtttgaagagataagtgttagaaacattaacatcaatgagcagcttcaagctcttatcgcacctgcaatacttccacgctcatttctaagcctacagcttttgcagtttatccgtactttcaaagctcagattccagtaaacgcaaccagcccaggaaggagatctgtaggtggattgtattacctatcgtatctcgataacaacatgcttttgggacggtctgtaggaggaggaggagtatttgtctttacaaaatctcaacccctcgagctgtgagcatcagacaaatctataaaactctgtttttgactgtataatcacagaaaaaagaagaacattatgttagcagattctgtttatgtacaatctattcgggttttattgaagatcttgtacaat

SEQ ID NO: 33380 - protein, 302 aa, Arabidopsis thaliana
  misc_feature (1)..(302): Ceres Seq. ID no. 13602938
SSQFVTILEQLLSFEGSKMDRIASATFSCPAISLSRVCRISPFGLNIKTNHRKRFSCRVAVASGETSARVVVDNELDLEHKKHDLLRAVQDTQRGLTATSDQRSIIEEALVTVEGFNGGEEIDPVKLDGTWRLQYTSAPDVVVLFEAASRLPFFQVGQVFQKFECRDRSDGGIIRNVVQWSLPSLLEEQEGATLVVTAKFDKVSSRNIYLQFEEISVRNININEQLQALIAPAILPRSFLSLQLLQFIRTFKAQIPVNATSPGRRSVGGLYYLSYLDNNMLLGRSVGGGGVFVFTKSQPLEL

SEQ ID NO: 33381 - protein, 284 aa, Arabidopsis thaliana
  misc_feature (1)..(284): Ceres Seq. ID no. 13602939
MDRIASATFSCPAISLSRVCRISPFGLNIKTNHRKRFSCRVAVASGETSARVVVDNELDLEHKKHDLLRAVQDTQRGLTATSDQRSIIEEALVTVEGFNGGEEIDPVKLDGTWRLQYTSAPDVVVLFEAASRLPFFQVGQVFQKFECRDRSDGGIIRNVVQWSLPSLLEEQEGATLVVTAKFDKVSSRNIYLQFEEISVRNININEQLQALIAPAILPRSFLSLQLLQFIRTFKAQIPVNATSPGRRSVGGLYYLSYLDNNMLLGRSVGGGGVFVFTKSQPLEL

SEQ ID NO: 33382 - DNA, 2331 bp, Arabidopsis thaliana
  misc_feature (1)..(2331): Ceres Seq. ID no. 13602940
atcaaattatcttctttctctttctctctgatcatttccaaattatttctaagctaagaaaatctttaaaaataacaaagcttctaaaataataatccgacctaccggattcaaaccattgatctgaagatcatctataaaccagtccttgatctataaactaaaataagggaagaaaaaaacaagagagagaaatagagaatgaagtcttttgcggctaaggtagaagagggagttaaaggaatagacggaaagccgtcggtaggtccggtgtaccggaatcttctgtcggaaaaaggttttcctccgattgattctgagatcaccactgcttgggacattttcagtaaatcagtggagaaattccctgacaataatatgcttggatggcgtcgaattgttgatgagaaggttggaccatatatgtggaaaacgtacaaggaagtatacgaagaagttttgcagattggctctgcactacgagccgccggagctgaacctgggagtcgagtggggatctacggtgttaattgtcctcagtggatcatagcaatggaggcttgtgcagctcacactctaatctgtgtacctctatatgatacattgggttcaggagcagtcgattacattgtagagcatgcggaaatcgactttgtgtttgtccaagacaccaaaattaaaggacttcttgagccagattgcaaatgtgctaaacggctaaaagctatagtttccttcactaacgtgagcgacgagcttagccacaaggcttcagaaattggagtcaaaacatactcctggatcgattttctccatatgggacgtgagaaaccggaagacacgaacccgcctaaggcgtttaacatatgcaccataatgtacaccagcggcacaagcggtgatcctaaaggtgtggttttgactcaccaagcggtcgcgacttttgttgttgggatggatctctatatggaccagtttgaagataagatgacacatgatgatgtgtatctctccttcttgcccttggctcatattcttgaccgtatgaacgaggaatacttctttcgcaaaggcgcttccgtcggctattaccatggaaatttgaacgtgttacgtgacgatattcaagaactgaaaccgacttatctagctggagtaccaagagtgtttgagagaatccatgaggggattcaaaaggctcttcaagaacttaacccaagaaggagattcatcttcaatgctctctacaaacacaagcttgcgtggttgaatcgtgggtactctcatagtaaagcttcacccatggctgatttcattgctttcagaaagattagagacaaattgggaggtcgcatccggttgctagtatctggaggagcacctttgagccctgagattgaagagtttttgagagttacttgttgttgctttgtcgttcaaggctacggtctaacggagacacttggaggaacggctttgggtttcccggacgagatgtgtatgctagggacagtcggtattccagcggtttacaacgagatacggcttgaagaggtgtctgaaatgggctatgacccgctcggagaaaatccggcaggagagatctgtataagaggacaatgtatgttttcagggtattacaagaaccctgaactcactgaagaagtcatgaaagatggatggttccacacaggagatataggtgagattcttccaaacggagtactcaagatcatcgatcgtaaaaagaatctgatcaaactttctcaaggagaatatgttgctctcgagcatttggaaaacatcttcgggcaaaactctgttgtccaagatatatgggtttatggagacagcttcaaatctatgcttgtcgcggtggttgttcccaacccagaaaccgtcaacaggtgggctaaagatctcggttttactaaaccattcgaagaactctgttctttcccggaactaaaagaacacatcatttcagaactgaagtccacggcagaaaagaacaagctaagaaagtttgagtacatcaaagcggtgacagtggagacaaaacctttcgacgtagagagagacttagtgactgcgacgctcaagaatcggaggaacaatcttctcaaatattatcaggtgcaaatcgacgaaatgtaccgcaaattggcctcaaagaaaatctgaaagtgttgcgatgatgtgtgtgctgttattgatagttatatatgtacgttatatgtatcaataattcatagatatgagctttatgctttatgtaatattttatttttatgttgtatgacatcataattatggaatttttttttgttg

SEQ ID NO: 33383 - protein, 660 aa, Arabidopsis thaliana
  misc_feature (1)..(660): Ceres Seq. ID no. 13602941
MKSFAAKVEEGVKGIDGKPSVGPVYRNLLSEKGFPPIDSEITTAWDIFSKSVEKFPDNNMLGWRRIVDEKVGPYMWKTYKEVYEEVLQIGSALRAAGAEPGSRVGIYGVNCPQWIIAMEACAAHTLICVPLYDTLGSGAVDYIVEHAEIDFVFVQDTKIKGLLEPDCKCAKRLKAIVSFTNVSDELSHKASEIGVKTYSWIDFLHMGREKPEDTNPPKAFNICTIMYTSGTSGDPKGVVLTHQAVATFVVGMDLYMDQFEDKMTHDDVYLSFLPLAHILDRMNEEYFFRKGASVGYYHGNLNVLRDDIQELKPTYLAGVPRVFERIHEGIQKALQELNPRRRFIFNALYKHKLAWLNRGYSHSKASPMADFIAFRKIRDKLGGRIRLLVSGGAPLSPEIEEFLRVTCCCFVVQGYGLTETLGGTALGFPDEMCMLGTVGIPAVYNEIRLEEVSEMGYDPLGENPAGEICIRGQCMFSGYYKNPELTEEVMKDGWFHTGDIGEILPNGVLKIIDRKKNLIKLSQGEYVALEHLENIFGQNSVVQDIWVYGDSFKSMLVAVVVPNPETVNRWAKDLGFTKPFEELCSFPELKEHIISELKSTAEKNKLRKFEYIKAVTVETKPFDVERDLVTATLKNRRNNLLKYYQVQIDEMYRKLASKKI

SEQ ID NO: 33384 - protein, 601 aa, Arabidopsis thaliana
  misc_feature (1)..(601): Ceres Seq. ID no. 13602942
MLGWRRIVDEKVGPYMWKTYKEVYEEVLQIGSALRAAGAEPGSRVGIYGVNCPQWIIAMEACAAHTLICVPLYDTLGSGAVDYIVEHAEIDFVFVQDTKIKGLLEPDCKCAKRLKAIVSFTNVSDELSHKASEIGVKTYSWIDFLHMGREKPEDTNPPKAFNICTIMYTSGTSGDPKGVVLTHQAVATFVVGMDLYMDQFEDKMTHDDVYLSFLPLAHILDRMNEEYFFRKGASVGYYHGNLNVLRDDIQELKPTYLAGVPRVFERIHEGIQKALQELNPRRRFIFNALYKHKLAWLNRGYSHSKASPMADFIAFRKIRDKLGGRIRLLVSGGAPLSPEIEEFLRVTCCCFVVQGYGLTETLGGTALGFPDEMCMLGTVGIPAVYNEIRLEEVSEMGYDPLGENPAGEICIRGQCMFSGYYKNPELTEEVMKDGWFHTGDIGEILPNGVLKIIDRKKNLIKLSQGEYVALEHLENIFGQNSVVQDIWVYGDSFKSMLVAVVVPNPETVNRWAKDLGFTKPFEELCSFPELKEHIISELKSTAEKNKLRKFEYIKAVTVETKPFDVERDLVTATLKNRRNNLLKYYQVQIDEMYRKLASKKI

SEQ ID NO: 33385 - protein, 586 aa, Arabidopsis thaliana
  misc_feature (1)..(586): Ceres Seq. ID no. 13602943
MWKTYKEVYEEVLQIGSALRAAGAEPGSRVGIYGVNCPQWIIAMEACAAHTLICVPLYDTLGSGAVDYIVEHAEIDFVFVQDTKIKGLLEPDCKCAKRLKAIVSFTNVSDELSHKASEIGVKTYSWIDFLHMGREKPEDTNPPKAFNICTIMYTSGTSGDPKGVVLTHQAVATFVVGMDLYMDQFEDKMTHDDVYLSFLPLAHILDRMNEEYFFRKGASVGYYHGNLNVLRDDIQELKPTYLAGVPRVFERIHEGIQKALQELNPRRRFIFNALYKHKLAWLNRGYSHSKASPMADFIAFRKIRDKLGGRIRLLVSGGAPLSPEIEEFLRVTCCCFVVQGYGLTETLGGTALGFPDEMCMLGTVGIPAVYNEIRLEEVSEMGYDPLGENPAGEICIRGQCMFSGYYKNPELTEEVMKDGWFHTGDIGEILPNGVLKIIDRKKNLIKLSQGEYVALEHLENIFGQNSVVQDIWVYGDSFKSMLVAVVVPNPETVNRWAKDLGFTKPFEELCSFPELKEHIISELKSTAEKNKLRKFEYIKAVTVETKPFDVERDLVTATLKNRRNNLLKYYQVQIDEMYRKLASKKI

SEQ ID NO: 33386 - DNA, 1302 bp, Arabidopsis thaliana
  misc_feature (1)..(1302): Ceres Seq. ID no. 13602944
atctttcttctctctctatctctcctctttgaaccctaaaaactctttctttacaaggattgatctttttgtatttttgattttgacatttgctttgtgttcgatctctgttttgatgcgatttctctgtttttaaagccatttgatagattgtttccggtaaagctcagcgagagaagaagaagaacaacaatggagtttacagatttctcaaagacgagtttttactacccgtcgtcacaaagcgtttgggatttcggagatttagcggcggcggagaggcattctttagggttcatggagttattaagttctcagcagcatcaagactttgctactgtttctcctcattccttccttctccaaacgtctcaaccgcaaacgcaaacgcaaccatcggcgaagctgtcttcaagtatcattcaagctccaccgtcagagcaattagtgacgtcaaaggtggagtctttgtgttcggatcatttgttgataaacccaccggcgactcctaactcgtcatcgatttcgtctgcttcaagcgaggctctaaatgaagagaaaccgaaaacagaagacaatgaagaagaaggaggtgaagatcaacaagagaagagtcatactaagaaacagttgaaagcaaagaagaataatcagaagagacagagagaggcaagagtcgcattcatgacaaagagtgaagttgatcatctcgaagatggttatcgctggcgaaaatatggtcaaaaagctgtcaaaaacagtccttttcccaggagttactaccgttgcacaacggcttcatgtaacgtgaagaagagagtggagagatcattcagagatccaagcactgtggttacaacctacgaaggtcaacacactcacattagtccactcacgtctcgtcctatttccactggaggtttcttcggatcgtcaggagctgcttcgagtctcggtaatggttgctttgggtttcctattgatggctccacgttaatctctcctcagttccaacagcttgtccaataccatcaccaacagcagcaacaagaactcatgtcttgttttggaggagtcaacgagtaccttaatagccacgctaatgagtatggtgatgataatcgtgtgaagaagagtcgagttttggttaaagataatggacttctgcaagatgttgttccgtctcatatgttgaaggaagagtagtagtatatatatagtcttatagttttaatctagtttttttttgtataattgtctaaaagaaacggatcttttgttctgatgaagaagatgttttct

SEQ ID NO: 33387 - protein, 337 aa, Arabidopsis thaliana
  misc_feature (1)..(337): Ceres Seq. ID no. 13602945
MEFTDFSKTSFYYPSSQSVWDFGDLAAAERHSLGFMELLSSQQHQDFATVSPHSFLLQTSQPQTQTQPSAKLSSSIIQAPPSEQLVTSKVESLCSDHLLINPPATPNSSSISSASSEALNEEKPKTEDNEEEGGEDQQEKSHTKKQLKAKKNNQKRQREARVAFMTKSEVDHLEDGYRWRKYGQKAVKNSPFPRSYYRCTTASCNVKKRVERSFRDPSTVVTTYEGQHTHISPLTSRPISTGGFFGSSGAASSLGNGCFGFPIDGSTLISPQFQQLVQYHHQQQQQELMSCFGGVNEYLNSHANEYGDDNRVKKSRVLVKDNGLLQDVVPSHMLKEE

SEQ ID NO: 33388 - protein, 302 aa, Arabidopsis thaliana
  misc_feature (1)..(302): Ceres Seq. ID no. 13602946
MELLSSQQHQDFATVSPHSFLLQTSQPQTQTQPSAKLSSSIIQAPPSEQLVTSKVESLCSDHLLINPPATPNSSSISSASSEALNEEKPKTEDNEEEGGEDQQEKSHTKKQLKAKKNNQKRQREARVAFMTKSEVDHLEDGYRWRKYGQKAVKNSPFPRSYYRCTTASCNVKKRVERSFRDPSTVVTTYEGQHTHISPLTSRPISTGGFFGSSGAASSLGNGCFGFPIDGSTLISPQFQQLVQYHHQQQQQELMSCFGGVNEYLNSHANEYGDDNRVKKSRVLVKDNGLLQDVVPSHMLKEE

SEQ ID NO: 33389 - protein, 173 aa, Arabidopsis thaliana
  misc_feature (1)..(173): Ceres Seq. ID no. 13602947
MTKSEVDHLEDGYRWRKYGQKAVKNSPFPRSYYRCTTASCNVKKRVERSFRDPSTVVTTYEGQHTHISPLTSRPISTGGFFGSSGAASSLGNGCFGFPIDGSTLISPQFQQLVQYHHQQQQQELMSCFGGVNEYLNSHANEYGDDNRVKKSRVLVKDNGLLQDVVPSHMLKEE

SEQ ID NO: 33390 - DNA, 1208 bp, Arabidopsis thaliana
  misc_feature (1)..(1208): Ceres Seq. ID no. 13602960
aaagagaatgggttctaagggagacaacgttgctgtatgtaacatgaagctcgagagacttctcagcatgaaaggtggcaaaggacaagacagctacgccaataactctcaagctcaggcaatgcatgcacggtccatgcttcacctcctagaggaaacacttgaaaatgttcacctcaactcctccgccagtccgccaccgttcacggcggttgatcttggctgttcctccggcgcaaatactgtccacataatcgatttcatagtcaaacatatctctaagaggtttgatgctgccggaatcgaccctccggagttcacagctttcttctccgatctcccaagcaacgacttcaacacgcttttccagcttcttccaccacttgtctctaacacttgcatggaggagtgtcttgctgccgacgggaaccgctcctacttcgttgctggtgttcccggatcgttttaccggcgactttttccagcgagaaccattgactttttccactctgccttctccttgcattggctctctcaggtgccggaaagtgtgacggataggagatcggcggcgtacaatagagggagagttttcatacacggtgccggagagaagacaacaacggcatacaaacggcagtttcaggccgacttagcggagtttttgagggcaagagcggcggaggttaagagaggtggggccatgttcctggtctgtcttggtcgtacctctgtggatcccaccgaccagggtggtgccggtctactcttcggcactcattttcaggacgcttgggacgaccttgtccgcgagggtttggtagcagcagagaaacgagatggattcaatatcccggtgtacgcaccaagcttgcaagatttcaaggaagtagttgacgccaacggctcatttgcaattgataagctggtagtatacaaaggagggagtccacttgtggtgaatgagccagacgatgcatcagaagttggtcgtgcctttgctagtagttgtcggagtgtggccggagtgctcgtggaagctcacataggcgaagagctaagcaataaactgttctcacgagttgaaagccgagccactagccatgccaaagatgtcttggtgaatttgcagttcttccacattgtcgcttctttgtcttttacttaattagtaccaaataatatgaaaaagaaatatgttcgtgtgc

SEQ ID NO: 33391 - protein, 388 aa, Arabidopsis thaliana
  misc_feature (1)..(388): Ceres Seq. ID no. 13602961
KRMGSKGDNVAVCNMKLERLLSMKGGKGQDSYANNSQAQAMHARSMLHLLEETLENVHLNSSASPPPFTAVDLGCSSGANTVHIIDFIVKHISKRFDAAGIDPPEFTAFFSDLPSNDFNTLFQLLPPLVSNTCMEECLAADGNRSYFVAGVPGSFYRRLFPARTIDFFHSAFSLHWLSQVPESVTDRRSAAYNRGRVFIHGAGEKTTTAYKRQFQADLAEFLRARAAEVKRGGAMFLVCLGRTSVDPTDQGGAGLLFGTHFQDAWDDLVREGLVAAEKRDGFNIPVYAPSLQDFKEVVDANGSFAIDKLVVYKGGSPLVVNEPDDASEVGRAFASSCRSVAGVLVEAHIGEELSNKLFSRVESRATSHAKDVLVNLQFFHIVASLSFT

SEQ ID NO: 33392 - protein, 386 aa, Arabidopsis thaliana
  misc_feature (1)..(386): Ceres Seq. ID no. 13602962
MGSKGDNVAVCNMKLERLLSMKGGKGQDSYANNSQAQAMHARSMLHLLEETLENVHLNSSASPPPFTAVDLGCSSGANTVHIIDFIVKHISKRFDAAGIDPPEFTAFFSDLPSNDFNTLFQLLPPLVSNTCMEECLAADGNRSYFVAGVPGSFYRRLFPARTIDFFHSAFSLHWLSQVPESVTDRRSAAYNRGRVFIHGAGEKTTTAYKRQFQADLAEFLRARAAEVKRGGAMFLVCLGRTSVDPTDQGGAGLLFGTHFQDAWDDLVREGLVAAEKRDGFNIPVYAPSLQDFKEVVDANGSFAIDKLVVYKGGSPLVVNEPDDASEVGRAFASSCRSVAGVLVEAHIGEELSNKLFSRVESRATSHAKDVLVNLQFFHIVASLSFT

SEQ ID NO: 33393 - protein, 374 aa, Arabidopsis thaliana
  misc_feature (1)..(374): Ceres Seq. ID no. 13602963
MKLERLLSMKGGKGQDSYANNSQAQAMHARSMLHLLEETLENVHLNSSASPPPFTAVDLGCSSGANTVHIIDFIVKHISKRFDAAGIDPPEFTAFFSDLPSNDFNTLFQLLPPLVSNTCMEECLAADGNRSYFVAGVPGSFYRRLFPARTIDFFHSAFSLHWLSQVPESVTDRRSAAYNRGRVFIHGAGEKTTTAYKRQFQADLAEFLRARAAEVKRGGAMFLVCLGRTSVDPTDQGGAGLLFGTHFQDAWDDLVREGLVAAEKRDGFNIPVYAPSLQDFKEVVDANGSFAIDKLVVYKGGSPLVVNEPDDASEVGRAFASSCRSVAGVLVEAHIGEELSNKLFSRVESRATSHAKDVLVNLQFFHIVASLSFT

SEQ ID NO: 33394 - DNA, 1997 bp, Arabidopsis thaliana
  misc_feature (1)..(1997): Ceres Seq. ID no. 13602972
ggaggaacgaagattatcgagagcaaaaatcatgagtagtacgatgttcgtgaaacggaatccgattagagaaaccaccgccgggaaaatctcttcgccgtcgtcaccgactttgaatgttgcagtcgcgcatataagagctggatcttattacgaaatcgatgcttcgattcttcctcagagatcgccggaaaatcttaaatcgattagagtcgtcatggtgagcaaaatcacggcgagtgacgtgtctctccggtacccaagcatgttttcactccgatcgcatttcgattacagtaggatgaaccggaataaaccgatgaagaagaggagtggtggtggtcttcttcctgttttcgacgagagtcatgtgatggcttcggagctagctggagacttgctttacagaagaatcgcacctcatgaactttctatgaatagaaattcctggggtttctgggtttctagttcttctcgcaggaacaaatttccaagaagggaggtggtttctcaaccggcgtacaatactcgtctctgtcgcgctgcttcaccggagggaaagtgctcgtctgagctgaaatcgggagggatgatcaagtggggaaggagattgcgtgtgcagtatcagagtcggcatattgatactaggaagaataaggaaggtgaggagagttctagagtgaaggatgaagtttacaaagaagaagagatggagaaagaagaggatgatgatgatgggaatgaaataggaggcactaaacaagaggcaaaggagataactaatggaaatcgtaagagaaagctgattgaatcaagtactgagagactcgctcagaaagctaaggtttatgatcagaagaaggaaactcaaattgtggtttataagaggaaatcagagaggaagttcattgatagatggtctgttgagaggtacaaactagctgagaggaacatgttaaaagtgatgaaggagaagaatgcagtgtttggcaactccatactcaggccagagttgaggtcagaagcaaggaagctgattggtgacacaggtctattggatcatctgcttaagcacatggctggtaaggtggctcctggaggtcaagataggtttatgagaaagcacaatgcagatggggcaatggagtattggttggagagttctgatttgattcacataaggaaagaagcaggagttaaagatccttactggactcctccacctggttggaagcttggtgacaacccttctcaagatcctgtctgcgctggagaaatccgtgacatcagagaagaattagctagcctgaaaagagaattgaagaaacttgcgtcaaagaaggaagaggaggagcttgttatcatgactacgcctaattcttgtgttactagtcagaatgataatctgatgactccagcaaaggaaatctacgctgatctgctgaaaaagaaatacaaaattgaggaccagctagtgattattggagaaaccttgcgtaaaatggaggaagacatgggatggcttaagaaaacagtggacgagaactatcctaaaaagccagactcaacagagacacctttgctactagaggattcaccaccaatacagacactagaaggagaagtgaaggtggtgaacaagggtaaccaaatcacagagtcacctcaaaacagagaaaaaggaaggaagcatgatcaacaagaaagatcaccactttcactaataagcaacactggtttcagaatctgcaggcctgtggggatgttcgcatggccccaattgcctgctcttgctgctgctactgatactaatgcttcttcgccaagtcacagacaagcctacccatccccttttccagtcaagccacttgcagctaagcgtcctcttggcttgacgtttcccttcaccatcatacccgaagaagctcccaagaatctcttcaacgtttgaagttgtcactggaaactgatgcatcagatcttactttccctacaag

SEQ ID NO: 33395 - protein, 649 aa, Arabidopsis thaliana
  misc_feature (1)..(649): Ceres Seq. ID no. 13602973
EERRLSRAKIMSSTMFVKRNPIRETTAGKISSPSSPTLNVAVAHIRAGSYYEIDASILPQRSPENLKSIRVVMVSKITASDVSLRYPSMFSLRSHFDYSRMNRNKPMKKRSGGGLLPVFDESHVMASELAGDLLYRRIAPHELSMNRNSWGFWVSSSSRRNKFPRREVVSQPAYNTRLCRAASPEGKCSSELKSGGMIKWGRRLRVQYQSRHIDTRKNKEGEESSRVKDEVYKEEEMEKEEDDDDGNEIGGTKQEAKEITNGNRKRKLIESSTERLAQKAKVYDQKKETQIVVYKRKSERKFIDRWSVERYKLAERNMLKVMKEKNAVFGNSILRPELRSEARKLIGDTGLLDHLLKHMAGKVAPGGQDRFMRKHNADGAMEYWLESSDLIHIRKEAGVKDPYWTPPPGWKLGDNPSQDPVCAGEIRDIREELASLKRELKKLASKKEEEELVIMTTPNSCVTSQNDNLMTPAKEIYADLLKKKYKIEDQLVIIGETLRKMEEDMGWLKKTVDENYPKKPDSTETPLLLEDSPPIQTLEGEVKVVNKGNQITESPQNREKGRKHDQQERSPLSLISNTGFRICRPVGMFAWPQLPALAAATDTNASSPSHRQAYPSPFPVKPLAAKRPLGLTFPFTIIPEEAPKNLFNV

SEQ ID NO: 33396 - protein, 639 aa, Arabidopsis thaliana
  misc_feature (1)..(639): Ceres Seq. ID no. 13602974
MSSTMFVKRNPIRETTAGKISSPSSPTLNVAVAHIRAGSYYEIDASILPQRSPENLKSIRVVMVSKITASDVSLRYPSMFSLRSHFDYSRMNRNKPMKKRSGGGLLPVFDESHVMASELAGDLLYRRIAPHELSMNRNSWGFWVSSSSRRNKFPRREVVSQPAYNTRLCRAASPEGKCSSELKSGGMIKWGRRLRVQYQSRHIDTRKNKEGEESSRVKDEVYKEEEMEKEEDDDDGNEIGGTKQEAKEITNGNRKRKLIESSTERLAQKAKVYDQKKETQIVVYKRKSERKFIDRWSVERYKLAERNMLKVMKEKNAVFGNSILRPELRSEARKLIGDTGLLDHLLKHMAGKVAPGGQDRFMRKHNADGAMEYWLESSDLIHIRKEAGVKDPYWTPPPGWKLGDNPSQDPVCAGEIRDIREELASLKRELKKLASKKEEEELVIMTTPNSCVTSQNDNLMTPAKEIYADLLKKKYKIEDQLVIIGETLRKMEEDMGWLKKTVDENYPKKPDSTETPLLLEDSPPIQTLEGEVKVVNKGNQITESPQNREKGRKHDQQERSPLSLISNTGFRICRPVGMFAWPQLPALAAATDTNASSPSHRQAYPSPFPVKPLAAKRPLGLTFPFTIIPEEAPKNLFNV

SEQ ID NO: 33397 - protein, 635 aa, Arabidopsis thaliana
  misc_feature (1)..(635): Ceres Seq. ID no. 13602975
MFVKRNPIRETTAGKISSPSSPTLNVAVAHIRAGSYYEIDASILPQRSPENLKSIRVVMVSKITASDVSLRYPSMFSLRSHFDYSRMNRNKPMKKRSGGGLLPVFDESHVMASELAGDLLYRRIAPHELSMNRNSWGFWVSSSSRRNKFPRREVVSQPAYNTRLCRAASPEGKCSSELKSGGMIKWGRRLRVQYQSRHIDTRKNKEGEESSRVKDEVYKEEEMEKEEDDDDGNEIGGTKQEAKEITNGNRKRKLIESSTERLAQKAKVYDQKKETQIVVYKRKSERKFIDRWSVERYKLAERNMLKVMKEKNAVFGNSILRPELRSEARKLIGDTGLLDHLLKHMAGKVAPGGQDRFMRKHNADGAMEYWLESSDLIHIRKEAGVKDPYWTPPPGWKLGDNPSQDPVCAGEIRDIREELASLKRELKKLASKKEEEELVIMTTPNSCVTSQNDNLMTPAKEIYADLLKKKYKIEDQLVIIGETLRKMEEDMGWLKKTVDENYPKKPDSTETPLLLEDSPPIQTLEGEVKVVNKGNQITESPQNREKGRKHDQQERSPLSLISNTGFRICRPVGMFAWPQLPALAAATDTNASSPSHRQAYPSPFPVKPLAAKRPLGLTFPFTIIPEEAPKNLFNV

SEQ ID NO: 33398 - DNA, 973 bp, Arabidopsis thaliana
  misc_feature (1)..(973): Ceres Seq. ID no. 13603003
aatttccatcaaattatttttcttttccttcttatgtaaattattccttatctatccaaattcgtcttcttgagtgaatttttaaagcgaatctcgacaaaactagctctcaaaaggggttttgggagttaccttttgtttctcagattttcccacattttcttggaagtaactgaaatggtgagaggaaagatcgaaatcaagaagattgagaacgtgacaagtagacaagtcacgttttcgaagcgaaggagtggtctctttaagaaggctcatgagctttctgttctatgtgatgctcaagtggcagctatgatcttctctcagaaaggaagattatatgaattcgctagctccgatatcaggaacacgataaagcgatacgctgagtacaagagagagtattttgttgcagaaactcatcctatagagcaatacgtgcaggggctaaagaaggaaatggtgacaatggtgaaaaagattgaagtgcttgaagtccataaccggaagatgatgggacaaagtttggattcttgttcggtaaaagaactttcagagatagccacacagatagagaaaagccttcatatggttagattaagaaaggctaagttatatgaagatgagctacagaaactaaaagccaaggagagggaactcaaggacgagagagtcaggctttctctaaaggttggagaaagaccaatggggatgccgtcgggaagcaaagagaaagaggatgttgaaactgatctatttattggatttctgaagaaccgaccataaaatcgtccttggtcattaaacgtcatttctagctatctatctcaattaatgttatgtatatgagtaatagtgtttcaaaatttcaatcacttgtcttttcgtataaactcagaataatgtaatgtgtaagagttctaactatgcttttgtttgtggatgtaatgtaatgtaaactcttaagtttctg

SEQ ID NO: 33399 - protein, 202 aa, Arabidopsis thaliana
  misc_feature (1)..(202): Ceres Seq. ID no. 13603004
MVRGKIEIKKIENVTSRQVTFSKRRSGLFKKAHELSVLCDAQVAAMIFSQKGRLYEFASSDIRNTIKRYAEYKREYFVAETHPIEQYVQGLKKEMVTMVKKIEVLEVHNRKMMGQSLDSCSVKELSEIATQIEKSLHMVRLRKAKLYEDELQKLKAKERELKDERVRLSLKVGERPMGMPSGSKEKEDVETDLFIGFLKNRP

SEQ ID NO: 33400 - protein, 157 aa, Arabidopsis thaliana
  misc_feature (1)..(157): Ceres Seq. ID no. 13603005
MIFSQKGRLYEFASSDIRNTIKRYAEYKREYFVAETHPIEQYVQGLKKEMVTMVKKIEVLEVHNRKMMGQSLDSCSVKELSEIATQIEKSLHMVRLRKAKLYEDELQKLKAKERELKDERVRLSLKVGERPMGMPSGSKEKEDVETDLFIGFLKNRP

SEQ ID NO: 33401 - protein, 108 aa, Arabidopsis thaliana
  misc_feature (1)..(108): Ceres Seq. ID no. 13603006
MVTMVKKIEVLEVHNRKMMGQSLDSCSVKELSEIATQIEKSLHMVRLRKAKLYEDELQKLKAKERELKDERVRLSLKVGERPMGMPSGSKEKEDVETDLFIGFLKNRP

SEQ ID NO: 33402 - DNA, 1156 bp, Arabidopsis thaliana
  misc_feature (1)..(1156): Ceres Seq. ID no. 13603007
atttttcgtcaaaagaatcagtaaaaactaaacattttgactatatcctacttgaatcaattcttcggctgattttgaagttttgtgacattcagatattctagggttttgtggtaaatggaatcgaatcacgaaggcaacgcgatacaagtgattgaccaagtaacaaccatgacccatctgtctgacccgaatccgaaaaccaaaccgggtatgatgctcatgaaacaagaagacgggtatttgcagccggtgaagactaaaccggctccgaagagaccgacttctaaagaccgtcacacgaaagtagaaggacgaggtcggaggatccgaatgccggcgggttgcgctgctcgggtctttcaattgacccgtgaacttggtcacaaatccgacggagaaacgatacggtggttattggaacgagctgaaccggcgataattgaagcaaccggaaccggaactgtaccggctattgctgtatcggttaacggaactttaaaaatcccgacgagctctccagtgttgaatgacggcggccgtgacggtgacggtgacctaataaagaaacggaggaagagaaactgtacgagcgatttcgtagacgttaatgacagctgtcatagctccgttacttctgggttagctccgataacggcgtcaaactacggcgttaatatcctgaacgttaatacacaggggtttgtgccgttttggcctatgggtatgggtactgcgtttgttactggtgggccggatcaaatgggccaaatgtgggctattcctaccgttgctacagctccgtttctgaatgttggtgctagaccggtgtctagttatgtctcaaacgcttcagacgctgaggcggagatggaaacgagcggtggcggaacgacgcaaccgctgagggatttttcgttggagatttatgataagagagagcttcagtttttgggtggctcagggaactcatctccgtcttcatgtcatgagacttaaggaattttaactcttagttctagtttctttttagtttttagtaagtttgattcctgatttaggttaagtaagatttgtaaaagaattgggagcacaatttcaattttatgtttctgtcaaacattttggtaattaatggaactatcctatcattttt

SEQ ID NO: 33403 - protein, 293 aa, Arabidopsis thaliana
  misc_feature (1)..(293): Ceres Seq. ID no. 13603008
MESNHEGNAIQVIDQVTTMTHLSDPNPKTKPGMMLMKQEDGYLQPVKTKPAPKRPTSKDRHTKVEGRGRRIRMPAGCAARVFQLTRELGHKSDGETIRWLLERAEPAIIEATGTGTVPAIAVSVNGTLKIPTSSPVLNDGGRDGDGDLIKKRRKRNCTSDFVDVNDSCHSSVTSGLAPITASNYGVNILNVNTQGFVPFWPMGMGTAFVTGGPDQMGQMWAIPTVATAPFLNVGARPVSSYVSNASDAEAEMETSGGGTTQPLRDFSLEIYDKRELQFLGGSGNSSPSSCHET

SEQ ID NO: 33404 - protein, 275 aa, Arabidopsis thaliana
  misc_feature (1)..(275): Ceres Seq. ID no. 13603009
MTHLSDPNPKTKPGMMLMKQEDGYLQPVKTKPAPKRPTSKDRHTKVEGRGRRIRMPAGCAARVFQLTRELGHKSDGETIRWLLERAEPAIIEATGTGTVPAIAVSVNGTLKIPTSSPVLNDGGRDGDGDLIKKRRKRNCTSDFVDVNDSCHSSVTSGLAPITASNYGVNILNVNTQGFVPFWPMGMGTAFVTGGPDQMGQMWAIPTVATAPFLNVGARPVSSYVSNASDAEAEMETSGGGTTQPLRDFSLEIYDKRELQFLGGSGNSSPSSCHET

SEQ ID NO: 33405 - protein, 261 aa, Arabidopsis thaliana
  misc_feature (1)..(261): Ceres Seq. ID no. 13603010
MMLMKQEDGYLQPVKTKPAPKRPTSKDRHTKVEGRGRRIRMPAGCAARVFQLTRELGHKSDGETIRWLLERAEPAIIEATGTGTVPAIAVSVNGTLKIPTSSPVLNDGGRDGDGDLIKKRRKRNCTSDFVDVNDSCHSSVTSGLAPITASNYGVNILNVNTQGFVPFWPMGMGTAFVTGGPDQMGQMWAIPTVATAPFLNVGARPVSSYVSNASDAEAEMETSGGGTTQPLRDFSLEIYDKRELQFLGGSGNSSPSSCHET

SEQ ID NO: 33406 - DNA, 563 bp, Arabidopsis thaliana
  misc_feature (1)..(563): Ceres Seq. ID no. 13603011
agtctactttatccgatcggcgccggcgagattcaagggtaaagaagaagatgagtggtgaagttgttttagctgctagagtttatcgtgaccttctcaaagcagtggtgaaacatgttggtaaagaagatcacaagtctcatttcttagactttgttaagcaagaatttcgaaagaatgcaaactcagagaaaataaaccttgctcgaaattacacatatcttctcaatagcattcactctcacaaggatctgctgttctcatacaacattgcggttgatagaactgaagaaatgaaacgagtgcttaataaatctgcagccagtgtagggcttcgtcttcctgaagtttacgagccttgatcatgcattcattcctctttgtctttccgggggatgagtcgttatgatttcttcatttctgtggacaggtctttggttaatttttgattatatgagatagtaaatgaagccagagagctcttttcctttaagcttttaagtattgacaaatccgagttgtgtgggttacaattttttgttagtgttgcaccacatttgttt

SEQ ID NO: 33407 - protein, 119 aa, Arabidopsis thaliana
  misc_feature (1)..(119): Ceres Seq. ID no. 13603012
STLSDRRRRDSRVKKKMSGEVVLAARVYRDLLKAVVKHVGKEDHKSHFLDFVKQEFRKNANSEKINLARNYTYLLNSIHSHKDLLFSYNIAVDRTEEMKRVLNKSAASVGLRLPEVYEP

SEQ ID NO: 33408 - protein, 103 aa, Arabidopsis thaliana
  misc_feature (1)..(103): Ceres Seq. ID no. 13603013
MSGEVVLAARVYRDLLKAVVKHVGKEDHKSHFLDFVKQEFRKNANSEKINLARNYTYLLNSIHSHKDLLFSYNIAVDRTEEMKRVLNKSAASVGLRLPEVYEP

SEQ ID NO: 33409 - DNA, 5045 bp, Arabidopsis thaliana
  misc_feature (1)..(5045): Ceres Seq. ID no. 13603040
atgccgccaagaagagcaagacgccccgcgaacgctcggataaaccgagtagcgaaggcaccagttgttgggcaagaccagccacctgtggtagctcaaccagctcaggcagctcaagcagatgaggcagctcaggcagctaatgcagctcatgcagcagagattgcagcgaatccacctggagttgctgcacctcagtaccatcagccaccgccgccgccaccagcacctagggttgaagttcgcgctgatgattggaggcagatgttggagaagaatttcaggacagcgaggtgcccagaggaatttaagaaggatcttgcagtgcattacctaaggggagaagcagatcattggtggaaaaattttaagaggggcttgcctgctggatatgtgcctacgtgggaggatttcttaagggagttcaataataagtactttccgcgggaagctatggaacagtttgatcatgagttcatggagcttcgtcagggcacgaggaccgttcgtgagtatgatgaggagttcagtcgtctaaggaggttcactatgaagaattttggagagcaggatatgattcaaagattcatgaggggactcagggttgatattcgtactcgtacctccattcgagggtgcactagcctcgttgagttagttgaggaggctgctaggttagagataggacttgtggaggaagttatggatctcaagaaggctcaagcaaaggtaacaaaaggagctgaatctcagaagcgcacttgggataatcgtggtgcagtatcagtccaaaatggtcagcattgcgccacatgtggaaaagacaataattgcaggaggtgttggaagccaggtcattttgcaagggattgtagagtgaatttggcagggggacaaccaggaaatcagaacagaggaattatgccaccaccgccaaagcggcaagcagtgggacctcgagtgtatgccatagcaggcgaggaggatgttgatgaggatggcgccgacccgattgttggaccaggattggtgaagtcgtcacggacctatcgggatgtccctgtagagattgaaggtgtggagttgtttgggaatttcctagagatggagttgaagcgttatgagataatcctcgggatgggttggttgaagagacataatgctaatttggattgcccaaggttgcgggttaattttactcgagaagagggtaatttgatgtttcagggagtcgaaactcgtagcgggccgatcttttcgatgattcaagcagataatttacagtggactggacctgaagcttacttggcaacaatctctattgacggaggagatacaggaatggaattaaaggatattcttgtagcagcagagtactcagatatttttgaaccgctccaaggaccgccaccagatagaggagatgctttcatcattgagttagagccagggactgctccagtatccaagacaccttaccgattagctccaacagaaatggctgaactgaagaagcagttagaggagcttacagacaaaggatttgtgaggccaagtagttcgctgtggggagcgcctgttctttttgtgaagaagaaagatggaactttcaggctttgtattgattaccgtggcttgaataaggtgactatcaagaacaaatatcctttaccgagaattgatgaattgttggaccaacttcagggagcatcttggttttcgaagatagatttggcatcaggttaccatcatattgctatctctgaggcagatgtgagtaaaacagctttcaggacacgttatgggcattatgagtttgttgtcatgccgtttggattgacgaatgcccctgcagcttttatgaagctaatgaataacatattccgggagtttttggacaagtttgttattgtgtttatcgatgacatcttgatatactctaggagtaaggaggagcatgttgagcatctaaggattgtgttacaacggttgcgagaccaccagctttttgcaaaattatcaaagtgcagtttttggcagaaaaagattggatttttgggtcatgtcatttcagaggaaggtgtagctgtggatccagagaagatcacgactatcactcattggcctagacccaagaacgctacagagattcgtagttttcttggacttgctggttattatcggaaatttgtggaaggatttgccagcattgccaaaccactaacacagttgacatgtaaggatgccaagtttgagtggacagaagcatgtgaagaaagttttggaaagttaaaggagcatttaactcagacacctatactagtattaccgaaggctggggtaccttatgcggtttatacggatgcatcgggaactgggttaggatgtgtatttgcatatgcatcatggcagttgagaaaacacgagattaattaccctactcatgaattggagttagctgcagtggtttttgctcttaaggtttggagagcctacttgtatggggagaaggtacaagtatttactgatcataagagtctgaagtatatcttcacccaagcagatttgaatctgagacagaggagatggacggagtttcttgcagactatgatttggatattgcttaccatccaggaaaagcaaatctggtggcagatgcactaagtagaaggagacatgatgtgcatgcaaccaaagaggttgaagagcttgtttcagctttgacaagtctcaatatctgtgaagctttagtggatgatgaagtagttggcttgaaagcgaaagaagatgtggtattaaagaaatcagtggagagtgaagttgaaggttatcacattaccaagaatgggacatttgtttttaaaggccgagtatgcgtcccagatgataaagatttgaaggaagagatcttgagacaggcgcatcagtcacgttttgctattcatccagggtctaccaaaatgtacagagacttgaagaggtactatcattgggttaagatgaaacgagaggttgctgactgggtagcaaagtgcacgacttgtcagttggtgaaagcagaacacaagtctccaagtggacttttacaaggtctaccattgccagaatggaaatgggatatggtgactatggattttgttactggacttccgagaacagcaagtaagcaggatgcaatttgggtaattgtagatcgacttactaagtcagctcattttctagcagtcaataaaaaagacacagctgaccgcttagctcaaaagtatatggatgagatagtgagacgtcatggagttccggtaagcattgtttctgatagagattcgaagttcacatcgttgttttggaaagcatttcagaaagctttgggaaccaaggtgcacttgagtaaagcatatcaccctcagacagatggtcaatttgagcggacgattcagactttggaggacatgcttagagcttgtatgctggattggggaggacgttgggaaaaatatctacctttggtagaatttgcttataacaacagttatcattcaagcataggcatgccgccatttgaggctctttatggaagaccttgtcgcacaccactttgttggacagaagtgggggagcgccaagacattaagcctgaaataattcaagagtcaactgagcaagtagagctgcttaaaaacaggctaagagaagctcatgaccgccaaaagagttatgcagataaaagaaggaaagggcttgagtttaaagttggtgacttggtgtatcttaaaatgagattgttcaaaggactgaatcgttgggctaagagaggaaaacttaagtcgagatacatgggtccttaccctatcatagagagagttggagctgtagcttaccgtttggacctaccagcagatttggcagcatttcatgatgtatttcacatatcggtgcttagaaaagttgtcacagaaccaaagcttatcatttcacggccaccagaggatcttgagttagacttatcggtaaaaggaaaaccggtatcaattgtgagtcatagagaaaatggttcacgggggaagaaagttaagtcgattcaagtttgctgggaaagggatggaattcaagagttgtcatgggaatcagaaagaatgatgcgggaagactacccagaactttttaaggacgaagaggaggatcatggtgatggatcgaattcgaggacgaattccattgtagtgggggagaattgtaacacccctattttacaattagaccatgaggcccaagtccaacccgctaatgatttgaacccaagtgaaaacctaatgatcccacgtgattataaaaggagaacgcaaactccaaatcaagtcataaaaaccctaagccggcaacctcgcaccactcagaccaccggagatcgttgttgtgttgagccggagtcaccgcgtgaatcatcctaaccggagagatttgtgccactccgccgttccaaccgccaagcaaaccgtaagggagactcgtcgagaaaagccaccgacaaaggtgaggaagagaatgttgagtagctgctcgcttggtgttatttcgggactttgggttttatttgatttatcgatatttcttatatttctaaacacggtttctttatacatttttatccaacgattttaatttatttatgctattattttgagacaatttatttctgatttttaataaaagaaagtttcccgaaattatgatattttatttcaagatctgatttgaagaagttgattaaatgaatggaaaagatgaaagtacgtcgtctcaaggttgagagagacgggtattataatactatctttcaagattcttttgaaatcgttgccttgcgatttcttatagtttctcattatgatttgtattgtctatctatctcttttttaaccatcgtttggtggtcttttgggtattcgtttaattacccttatgttggtttttttccatttttttggatgtaatccctcctctgatagagtttgaggcgtaactctaatgaagttatcagttggtc

SEQ ID NO: 33410 - protein, 1482 aa, Arabidopsis thaliana
  misc_feature (1)..(1482): Ceres Seq. ID no. 13603041
MPPRRARRPANARINRVAKAPVVGQDQPPVVAQPAQAAQADEAAQAANAAHAAEIAANPPGVAAPQYHQPPPPPPAPRVEVRADDWRQMLEKNFRTARCPEEFKKDLAVHYLRGEADHWWKNFKRGLPAGYVPTWEDFLREFNNKYFPREAMEQFDHEFMELRQGTRTVREYDEEFSRLRRFTMKNFGEQDMIQRFMRGLRVDIRTRTSIRGCTSLVELVEEAARLEIGLVEEVMDLKKAQAKVTKGAESQKRTWDNRGAVSVQNGQHCATCGKDNNCRRCWKPGHFARDCRVNLAGGQPGNQNRGIMPPPPKRQAVGPRVYAIAGEEDVDEDGADPIVGPGLVKSSRTYRDVPVEIEGVELFGNFLEMELKRYEIILGMGWLKRHNANLDCPRLRVNFTREEGNLMFQGVETRSGPIFSMIQADNLQWTGPEAYLATISIDGGDTGMELKDILVAAEYSDIFEPLQGPPPDRGDAFIIELEPGTAPVSKTPYRLAPTEMAELKKQLEELTDKGFVRPSSSLWGAPVLFVKKKDGTFRLCIDYRGLNKVTIKNKYPLPRIDELLDQLQGASWFSKIDLASGYHHIAISEADVSKTAFRTRYGHYEFVVMPFGLTNAPAAFMKLMNNIFREFLDKFVIVFIDDILIYSRSKEEHVEHLRIVLQRLRDHQLFAKLSKCSFWQKKIGFLGHVISEEGVAVDPEKITTITHWPRPKNATEIRSFLGLAGYYRKFVEGFASIAKPLTQLTCKDAKFEWTEACEESFGKLKEHLTQTPILVLPKAGVPYAVYTDASGTGLGCVFAYASWQLRKHEINYPTHELELAAVVFALKVWRAYLYGEKVQVFTDHKSLKYIFTQADLNLRQRRWTEFLADYDLDIAYHPGKANLVADALSRRRHDVHATKEVEELVSALTSLNICEALVDDEVVGLKAKEDVVLKKSVESEVEGYHITKNGTFVFKGRVCVPDDKDLKEEILRQAHQSRFAIHPGSTKMYRDLKRYYHWVKMKREVADWVAKCTTCQLVKAEHKSPSGLLQGLPLPEWKWDMVTMDFVTGLPRTASKQDAIWVIVDRLTKSAHFLAVNKKDTADRLAQKYMDEIVRRHGVPVSIVSDRDSKFTSLFWKAFQKALGTKVHLSKAYHPQTDGQFERTIQTLEDMLRACMLDWGGRWEKYLPLVEFAYNNSYHSSIGMPPFEALYGRPCRTPLCWTEVGERQDIKPEIIQESTEQVELLKNRLREAHDRQKSYADKRRKGLEFKVGDLVYLKMRLFKGLNRWAKRGKLKSRYMGPYPIIERVGAVAYRLDLPADLAAFHDVFHISVLRKVVTEPKLIISRPPEDLELDLSVKGKPVSIVSHRENGSRGKKVKSIQVCWERDGIQELSWESERMMREDYPELFKDEEEDHGDGSNSRTNSIVVGENCNTPILQLDHEAQVQPANDLNPSENLMIPRDYKRRTQTPNQVIKTLSRQPRTTQTTGDRCCVEPESPRESS

SEQ ID NO: 33411 - protein, 1394 aa, Arabidopsis thaliana
  misc_feature (1)..(1394): Ceres Seq. ID no. 13603042
MLEKNFRTARCPEEFKKDLAVHYLRGEADHWWKNFKRGLPAGYVPTWEDFLREFNNKYFPREAMEQFDHEFMELRQGTRTVREYDEEFSRLRRFTMKNFGEQDMIQRFMRGLRVDIRTRTSIRGCTSLVELVEEAARLEIGLVEEVMDLKKAQAKVTKGAESQKRTWDNRGAVSVQNGQHCATCGKDNNCRRCWKPGHFARDCRVNLAGGQPGNQNRGIMPPPPKRQAVGPRVYAIAGEEDVDEDGADPIVGPGLVKSSRTYRDVPVEIEGVELFGNFLEMELKRYEIILGMGWLKRHNANLDCPRLRVNFTREEGNLMFQGVETRSGPIFSMIQADNLQWTGPEAYLATISIDGGDTGMELKDILVAAEYSDIFEPLQGPPPDRGDAFIIELEPGTAPVSKTPYRLAPTEMAELKKQLEELTDKGFVRPSSSLWGAPVLFVKKKDGTFRLCIDYRGLNKVTIKNKYPLPRIDELLDQLQGASWFSKIDLASGYHHIAISEADVSKTAFRTRYGHYEFVVMPFGLTNAPAAFMKLMNNIFREFLDKFVIVFIDDILIYSRSKEEHVEHLRIVLQRLRDHQLFAKLSKCSFWQKKIGFLGHVISEEGVAVDPEKITTITHWPRPKNATEIRSFLGLAGYYRKFVEGFASIAKPLTQLTCKDAKFEWTEACEESFGKLKEHLTQTPILVLPKAGVPYAVYTDASGTGLGCVFAYASWQLRKHEINYPTHELELAAVVFALKVWRAYLYGEKVQVFTDHKSLKYIFTQADLNLRQRRWTEFLADYDLDIAYHPGKANLVADALSRRRHDVHATKEVEELVSALTSLNICEALVDDEVVGLKAKEDVVLKKSVESEVEGYHITKNGTFVFKGRVCVPDDKDLKEEILRQAHQSRFAIHPGSTKMYRDLKRYYHWVKMKREVADWVAKCTTCQLVKAEHKSPSGLLQGLPLPEWKWDMVTMDFVTGLPRTASKQDAIWVIVDRLTKSAHFLAVNKKDTADRLAQKYMDEIVRRHGVPVSIVSDRDSKFTSLFWKAFQKALGTKVHLSKAYHPQTDGQFERTIQTLEDMLRACMLDWGGRWEKYLPLVEFAYNNSYHSSIGMPPFEALYGRPCRTPLCWTEVGERQDIKPEIIQESTEQVELLKNRLREAHDRQKSYADKRRKGLEFKVGDLVYLKMRLFKGLNRWAKRGKLKSRYMGPYPIIERVGAVAYRLDLPADLAAFHDVFHISVLRKVVTEPKLIISRPPEDLELDLSVKGKPVSIVSHRENGSRGKKVKSIQVCWERDGIQELSWESERMMREDYPELFKDEEEDHGDGSNSRTNSIVVGENCNTPILQLDHEAQVQPANDLNPSENLMIPRDYKRRTQTPNQVIKTLSRQPRTTQTTGDRCCVEPESPRESS

SEQ ID NO: 33412 - protein, 1331 aa, Arabidopsis thaliana
  misc_feature (1)..(1331): Ceres Seq. ID no. 13603043
MEQFDHEFMELRQGTRTVREYDEEFSRLRRFTMKNFGEQDMIQRFMRGLRVDIRTRTSIRGCTSLVELVEEAARLEIGLVEEVMDLKKAQAKVTKGAESQKRTWDNRGAVSVQNGQHCATCGKDNNCRRCWKPGHFARDCRVNLAGGQPGNQNRGIMPPPPKRQAVGPRVYAIAGEEDVDEDGADPIVGPGLVKSSRTYRDVPVEIEGVELFGNFLEMELKRYEIILGMGWLKRHNANLDCPRLRVNFTREEGNLMFQGVETRSGPIFSMIQADNLQWTGPEAYLATISIDGGDTGMELKDILVAAEYSDIFEPLQGPPPDRGDAFIIELEPGTAPVSKTPYRLAPTEMAELKKQLEELTDKGFVRPSSSLWGAPVLFVKKKDGTFRLCIDYRGLNKVTIKNKYPLPRIDELLDQLQGASWFSKIDLASGYHHIAISEADVSKTAFRTRYGHYEFVVMPFGLTNAPAAFMKLMNNIFREFLDKFVIVFIDDILIYSRSKEEHVEHLRIVLQRLRDHQLFAKLSKCSFWQKKIGFLGHVISEEGVAVDPEKITTITHWPRPKNATEIRSFLGLAGYYRKFVEGFASIAKPLTQLTCKDAKFEWTEACEESFGKLKEHLTQTPILVLPKAGVPYAVYTDASGTGLGCVFAYASWQLRKHEINYPTHELELAAVVFALKVWRAYLYGEKVQVFTDHKSLKYIFTQADLNLRQRRWTEFLADYDLDIAYHPGKANLVADALSRRRHDVHATKEVEELVSALTSLNICEALVDDEVVGLKAKEDVVLKKSVESEVEGYHITKNGTFVFKGRVCVPDDKDLKEEILRQAHQSRFAIHPGSTKMYRDLKRYYHWVKMKREVADWVAKCTTCQLVKAEHKSPSGLLQGLPLPEWKWDMVTMDFVTGLPRTASKQDAIWVIVDRLTKSAHFLAVNKKDTADRLAQKYMDEIVRRHGVPVSIVSDRDSKFTSLFWKAFQKALGTKVHLSKAYHPQTDGQFERTIQTLEDMLRACMLDWGGRWEKYLPLVEFAYNNSYHSSIGMPPFEALYGRPCRTPLCWTEVGERQDIKPEIIQESTEQVELLKNRLREAHDRQKSYADKRRKGLEFKVGDLVYLKMRLFKGLNRWAKRGKLKSRYMGPYPIIERVGAVAYRLDLPADLAAFHDVFHISVLRKVVTEPKLIISRPPEDLELDLSVKGKPVSIVSHRENGSRGKKVKSIQVCWERDGIQELSWESERMMREDYPELFKDEEEDHGDGSNSRTNSIVVGENCNTPILQLDHEAQVQPANDLNPSENLMIPRDYKRRTQTPNQVIKTLSRQPRTTQTTGDRCCVEPESPRESS

SEQ ID NO: 33413 - DNA, 1003 bp, Arabidopsis thaliana
  misc_feature (1)..(1003): Ceres Seq. ID no. 13603052
ctcacacacacaccaacgcaaacctccaaaacagggccggggcgattcattcacaatctcggcgattctctcttccgtctcgagtcgctgagatccatcagtaaaaggtctgcaaaatggttgctcagggattcactgtggatcttaaaaagccccttgtatttcaggttggtcatcttggagaagattatgaggaatgggttcaccaacctatcgcgaccaaggaaggccctcggttttttcagagtgacttttgggagttcttgacacttacagtttggtgggcagttcctgtcatttggttgccagttgtagtctggtgcatatcaaggtcagtaagtatgggatgttcacttccagaaatcgtcccaattgttgtcatgggaatattcatctggacattttttgaatacgttcttcaccggttcgttttccacataaaaacgaagagttactggggaaacactgcacactatcttattcacggatgccatcataagcacccgatggaccaccttcggctcgtctttcctcctactgcaacagcgattttatgctttccgttctggaacattgcgaaggctatctcaactccttcaaccgcacctgcattgtttggtggaggcatgctcggatatgtgatgtacgatgtcactcattattaccttcaccatgcccaacctactagaccagtgaccaaaaatctcaagaagtaccatttgaatcatcacttcaggattcaggacaaaggatttggtataacttcgtcgttatgggacatagtctttgggacacttcccaccacaaaagcccccagaaaagagcaatagtagtaaaaggcaaaaactaaaaagatgtttgtaatacatttaatttaatcttaagttattaatcatccttctgaattttgagatgtttaatctgaggtttcatttggatcactgtcttttgtagtttgtaaatcaatacttcacaatcctaatataatatttttctgcgaaag

SEQ ID NO: 33414 - protein, 237 aa, Arabidopsis thaliana
  misc_feature (1)..(237): Ceres Seq. ID no. 13603053
MVAQGFTVDLKKPLVFQVGHLGEDYEEWVHQPIATKEGPRFFQSDFWEFLTLTVWWAVPVIWLPVVVWCISRSVSMGCSLPEIVPIVVMGIFIWTFFEYVLHRFVFHIKTKSYWGNTAHYLIHGCHHKHPMDHLRLVFPPTATAILCFPFWNIAKAISTPSTAPALFGGGMLGYVMYDVTHYYLHHAQPTRPVTKNLKKYHLNHHFRIQDKGFGITSSLWDIVFGTLPTTKAPRKEQ

SEQ ID NO: 33415 - protein, 162 aa, Arabidopsis thaliana
  misc_feature (1)..(162): Ceres Seq. ID no. 13603054
MGCSLPEIVPIVVMGIFIWTFFEYVLHRFVFHIKTKSYWGNTAHYLIHGCHHKHPMDHLRLVFPPTATAILCFPFWNIAKAISTPSTAPALFGGGMLGYVMYDVTHYYLHHAQPTRPVTKNLKKYHLNHHFRIQDKGFGITSSLWDIVFGTLPTTKAPRKEQ

SEQ ID NO: 33416 - protein, 149 aa, Arabidopsis thaliana
  misc_feature (1)..(149): Ceres Seq. ID no. 13603055
MGIFIWTFFEYVLHRFVFHIKTKSYWGNTAHYLIHGCHHKHPMDHLRLVFPPTATAILCFPFWNIAKAISTPSTAPALFGGGMLGYVMYDVTHYYLHHAQPTRPVTKNLKKYHLNHHFRIQDKGFGITSSLWDIVFGTLPTTKAPRKEQ

SEQ ID NO: 33417 - DNA, 1625 bp, Arabidopsis thaliana
  misc_feature (1)..(1625): Ceres Seq. ID no. 13603067
ctctttcggatattccaccagtctctcgcaatcttcgctcttctctttgctctctctctctcaacgcggttcagatccgagtttgggagattcaagctccctgaaaaaagccctttactctcgcttaccaactttgctccagcatggcaggatctgcaccagaaggcacacagtttgatgcacgtcagtttgaccagaaactcaatgaagtacttgagggacaagatgagttcttcacatcctatgatgatgttcatgagagctttgatgccatgggtcttcaagagaaccttctcaggggtatttatgcttatggttttgagaagccttctgctattcagcaaagaggaatcgtccccttctgtaagggtcttgatgtgattcaacaggctcagtctggtactgggaaaacagcaactttctgctctggtgtcttgcagcagctggacttctcccttatccagtgtcaggctttggttctagctccaactagagagcttgctcagcaaattgagaaggtcatgagggcccttggtgattaccttggtgtcaaggttcacgcctgtgttggtggaaccagtgtccgtgaggatcagcgcatcctccaagctggtgtccatgttgttgttggaactccagggcgtgtctttgacatgttgaagaggcagtctcttcgtgctgacaacatcaagatgtttgttctcgatgaagctgatgaaatgctctcccgtggtttcaaggaccagatctatgacatattccagcttcttccaccaaagatccaagttggtgtgttctccgcaacaatgccaccagaagctcttgagatcacaaggaagttcatgagcaagccagtgagaatcttggtgaagcgtgatgagcttacccttgaaggtatcaagcagttctacgtcaacgttgagaaagaagagtggaagctcgagacactctgtgatctctacgagactcttgccatcactcagagtgtcatcttcgtgaacaccaggcgtaaggttgattggctcacagacaaaatgagaagccgtgaccacacagtctctgcaactcacggagacatggaccagaacaccagggacatcatcatgagagagttcaggtctggttcctcccgtgttctcatcaccactgacctcttagctcgtggtattgatgtccaacaagtctccctggttatcaacttcgatctcccaactcagccagagaactaccttcaccgtatcggaagaagtggaaggttcgggagaaagggtgttgcgatcaatttcgtgacccgtgatgatgagaggatgctgtttgatattcagaaattctacaatgtggttgtcgaagagctgccttcgaacgtggccgatctgctgtgaagggagaaaagaagtcggttctgttgctgtgtttgctctgccgtactagtatcaccggagaagaaaggttttcttgttttgcaaggcactctttgatctgattttgacccgtcgtctatcagcgatttacatttcttaaattttcttagttgttgttctctcctctctctcccagctacgaacatatctctctcttcttgaccatttttaagtttaagtcatatggagtatttatttcttcac

SEQ ID NO: 33418 - protein, 412 aa, Arabidopsis thaliana
  misc_feature (1)..(412): Ceres Seq. ID no. 13603068
MAGSAPEGTQFDARQFDQKLNEVLEGQDEFFTSYDDVHESFDAMGLQENLLRGIYAYGFEKPSAIQQRGIVPFCKGLDVIQQAQSGTGKTATFCSGVLQQLDFSLIQCQALVLAPTRELAQQIEKVMRALGDYLGVKVHACVGGTSVREDQRILQAGVHVVVGTPGRVFDMLKRQSLRADNIKMFVLDEADEMLSRGFKDQIYDIFQLLPPKIQVGVFSATMPPEALEITRKFMSKPVRILVKRDELTLEGIKQFYVNVEKEEWKLETLCDLYETLAITQSVIFVNTRRKVDWLTDKMRSRDHTVSATHGDMDQNTRDIIMREFRSGSSRVLITTDLLARGIDVQQVSLVINFDLPTQPENYLHRIGRSGRFGRKGVAINFVTRDDERMLFDIQKFYNVVVEELPSNVADLL

SEQ ID NO: 33419 - protein, 369 aa, Arabidopsis thaliana
  misc_feature (1)..(369): Ceres Seq. ID no. 13603069
MGLQENLLRGIYAYGFEKPSAIQQRGIVPFCKGLDVIQQAQSGTGKTATFCSGVLQQLDFSLIQCQALVLAPTRELAQQIEKVMRALGDYLGVKVHACVGGTSVREDQRILQAGVHVVVGTPGRVFDMLKRQSLRADNIKMFVLDEADEMLSRGFKDQIYDIFQLLPPKIQVGVFSATMPPEALEITRKFMSKPVRILVKRDELTLEGIKQFYVNVEKEEWKLETLCDLYETLAITQSVIFVNTRRKVDWLTDKMRSRDHTVSATHGDMDQNTRDIIMREFRSGSSRVLITTDLLARGIDVQQVSLVINFDLPTQPENYLHRIGRSGRFGRKGVAINFVTRDDERMLFDIQKFYNVVVEELPSNVADLL

SEQ ID NO: 33420 - protein, 286 aa, Arabidopsis thaliana
  misc_feature (1)..(286): Ceres Seq. ID no. 13603070
MRALGDYLGVKVHACVGGTSVREDQRILQAGVHVVVGTPGRVFDMLKRQSLRADNIKMFVLDEADEMLSRGFKDQIYDIFQLLPPKIQVGVFSATMPPEALEITRKFMSKPVRILVKRDELTLEGIKQFYVNVEKEEWKLETLCDLYETLAITQSVIFVNTRRKVDWLTDKMRSRDHTVSATHGDMDQNTRDIIMREFRSGSSRVLITTDLLARGIDVQQVSLVINFDLPTQPENYLHRIGRSGRFGRKGVAINFVTRDDERMLFDIQKFYNVVVEELPSNVADLL

SEQ ID NO: 33421 - DNA, 1574 bp, Arabidopsis thaliana
  misc_feature (1)..(1574): Ceres Seq. ID no. 13603071
gaaagtggtcatctttgtctgtctctgtccgaaactcaggagccctaatctctgaatccatcaagaaagctctttctcttccttcttttatgcttctgaatttgctacatatataaactatctgaagaaagctagagaataagatgatgagtctaagtggaagtagcgggagaacaataggaaggcctccatttacaccaacacaatgggaagaactggaacatcaagccctaatctacaagtacatggtctctggtgttcctgtcccacctgagctcatcttctccattagaagaagcttggacacttccttggtctctagactccttcctcaccaatcccttggatgggggtgttaccagatgggatttgggagaaaaccagatccagagccaggaagatgcagaagaacagatggtaagaaatggagatgctcaagagaagcttacccagattcgaagtactgtgaaaaacacatgcacagaggaagaaaccgtgccagaaaatctcttgatcagaatcagacaacaacaactcctttaacatcaccatctctctcattcaccaacaacaacaacccaagtcccaccttgtcttcttcttcttcctctaattcctcttctactacttattctgcttcttcttcttcaatggatgcctacagtaacagtaataggtttgggcttggtggaagtagtagtaacactagaggttatttcaacagccattctcttgattatccttatccttctacttcacccaaacaacaacaacaaactcttcatcatgcttccgctttgtcacttcatcaaaatactaattctacttctcagttcaatgtcttagcctctgctactgaccacaaagacttcaggtactttcaagggattggggagagagttggaggagttggggagagaacgttctttccagaagcatctagaagctttcaagattctccataccatcatcaccaacaaccgttagcaacagtgatgaatgatccgtaccaccactgtagtactgatcataataagattgatcatcatcacacatactcatcctcatcatcatctcaacatcttcatcatgatcatgatcatagacagcaacagtgttttgttttgggcgccgacatgttcaacaaacctacaagaagtgtccttgcaaactcatcaagacaagatcaaaatcaagaagaagatgagaaagattcatcagagtcgtccaagaagtctctacatcacttctttggtgaggactgggcacagaacaagaacagttcagattcttggcttgacctttcttcccactcaagactcgacactggtagctaattaagtagagctggcatcaatgatggatctgcaccaacacacacaactgtgaaatgttgaagaagagtcacatttcacatctatttccgtggaacaatgagacaagacactgtttgcagaatcctatatgtattttttctatctttttctatgtgtgttaggtccaacaagaaaaagtgatccgacagatatatctgtatgtgttctcttgctttctcaagaaatcagattttattt

SEQ ID NO: 33422 - protein, 397 aa, Arabidopsis thaliana
  misc_feature (1)..(397): Ceres Seq. ID no. 13603072
MMSLSGSSGRTIGRPPFTPTQWEELEHQALIYKYMVSGVPVPPELIFSIRRSLDTSLVSRLLPHQSLGWGCYQMGFGRKPDPEPGRCRRTDGKKWRCSREAYPDSKYCEKHMHRGRNRARKSLDQNQTTTTPLTSPSLSFTNNNNPSPTLSSSSSSNSSSTTYSASSSSMDAYSNSNRFGLGGSSSNTRGYFNSHSLDYPYPSTSPKQQQQTLHHASALSLHQNTNSTSQFNVLASATDHKDFRYFQGIGERVGGVGERTFFPEASRSFQDSPYHHHQQPLATVMNDPYHHCSTDHNKIDHHHTYSSSSSSQHLHHDHDHRQQQCFVLGADMFNKPTRSVLANSSRQDQNQEEDEKDSSESSKKSLHHFFGEDWAQNKNSSDSWLDLSSHSRLDTGS

SEQ ID NO: 33423 - protein, 396 aa, Arabidopsis thaliana
  misc_feature (1)..(396): Ceres Seq. ID no. 13603073
MSLSGSSGRTIGRPPFTPTQWEELEHQALIYKYMVSGVPVPPELIFSIRRSLDTSLVSRLLPHQSLGWGCYQMGFGRKPDPEPGRCRRTDGKKWRCSREAYPDSKYCEKHMHRGRNRARKSLDQNQTTTTPLTSPSLSFTNNNNPSPTLSSSSSSNSSSTTYSASSSSMDAYSNSNRFGLGGSSSNTRGYFNSHSLDYPYPSTSPKQQQQTLHHASALSLHQNTNSTSQFNVLASATDHKDFRYFQGIGERVGGVGERTFFPEASRSFQDSPYHHHQQPLATVMNDPYHHCSTDHNKIDHHHTYSSSSSSQHLHHDHDHRQQQCFVLGADMFNKPTRSVLANSSRQDQNQEEDEKDSSESSKKSLHHFFGEDWAQNKNSSDSWLDLSSHSRLDTGS

SEQ ID NO: 33424 - protein, 363 aa, Arabidopsis thaliana
  misc_feature (1)..(363): Ceres Seq. ID no. 13603074
MVSGVPVPPELIFSIRRSLDTSLVSRLLPHQSLGWGCYQMGFGRKPDPEPGRCRRTDGKKWRCSREAYPDSKYCEKHMHRGRNRARKSLDQNQTTTTPLTSPSLSFTNNNNPSPTLSSSSSSNSSSTTYSASSSSMDAYSNSNRFGLGGSSSNTRGYFNSHSLDYPYPSTSPKQQQQTLHHASALSLHQNTNSTSQFNVLASATDHKDFRYFQGIGERVGGVGERTFFPEASRSFQDSPYHHHQQPLATVMNDPYHHCSTDHNKIDHHHTYSSSSSSQHLHHDHDHRQQQCFVLGADMFNKPTRSVLANSSRQDQNQEEDEKDSSESSKKSLHHFFGEDWAQNKNSSDSWLDLSSHSRLDTGS

SEQ ID NO: 33425 - protein, 286 aa, Arabidopsis thaliana
  misc_feature (1)..(286): Ceres Seq. ID no. 13603075
MHRGRNRARKSLDQNQTTTTPLTSPSLSFTNNNNPSPTLSSSSSSNSSSTTYSASSSSMDAYSNSNRFGLGGSSSNTRGYFNSHSLDYPYPSTSPKQQQQTLHHASALSLHQNTNSTSQFNVLASATDHKDFRYFQGIGERVGGVGERTFFPEASRSFQDSPYHHHQQPLATVMNDPYHHCSTDHNKIDHHHTYSSSSSSQHLHHDHDHRQQQCFVLGADMFNKPTRSVLANSSRQDQNQEEDEKDSSESSKKSLHHFFGEDWAQNKNSSDSWLDLSSHSRLDTGS

SEQ ID NO: 33426 - DNA, 1485 bp, Arabidopsis thaliana
  misc_feature (1)..(1485): Ceres Seq. ID no. 13603079
gggtttcattcttctaaattctcaggtcgaaattgaaactctttagtgagtgatagagatgctgacatgcatagcttgtacgaagcagctaaacaccaacaatggtggatctaagaaacaagaagaggatgaagaagaagaagacagagttattgaaacacccaggtctaagcagattaagtccctgacgtcacagattaaagacatggcagtaaaagcatcaggtgcttacaaaagctgcaaaccgtgttctgggtcgtctaatcagaataagaaccgaagctacgctgattcggatgttgcttcgaattctgggaggtttcgttatgcgtacaagagagcggggagtggaagctcaacaccgaagattttggggaaggaaatggagtcaaggttgaaaggttttttgagtggagaaggaacacctgaatccatgagtggtaggacagagtctacagtgttcatggaggaagaagatgagctcaaggaatgggttgctcaagtggagcctggtgtcctcatcacatttgtatcattgcctgagggagggaatgatatgaagcggattcggttcagccgtgaaatgttcgataaatggcaagctcaaaagtggtgggcggagaatttcgacaaggtcatggaattatacaatgtacagcagttcaatcagcagagcgtcccacttccaactcctcctagatctgaagatgggagctcgcgaattcagtctaccaagaatggtcctgcaactccacctctgaacaaagaatgctctcgaggaaaaggctacgcttcttctggctcactcgctcaccaaccaacaacccaaacacaaagtcgacaccatgattcatctggtcttgctacaacaccaaaactctctagcataagtgggacaaaaaccgagacatcatctgttgatgagtctgcaagaagtagcttctcaagggaagaagaagaagcagatcattcaggggaggagctatctgtaagtaatgcaagtgacattgaaacagaatgggtggaacaggacgaagcaggtgtttacatcacaatcagagctttaccagatgggactcgcgagcttaggcgtgttcgcttcagccgagagaagtttggggaaacgaatgcaagattgtggtgggagcagaacagagctcggatacaacaacaatacttgtgatgaccgatgacggtcgaaggctctctagagaagaatctgacacacaccaaaacaaaacacttttcttttatatgttttacttggaaaaaagctacagagtgatggaaataacttgggattcagataatgaatgtgctttttagttggtggttgttagtacatctctttctcttctttctcatctacatctatctataaagaggaggtattagttttactggattttcttggtgttattttcttaaggtaatgtactgtatatagtttaatactaagaaaattcatattattggatttgaaag

SEQ ID NO: 33427 - protein, 374 aa, Arabidopsis thaliana
  misc_feature (1)..(374): Ceres Seq. ID no. 13603080
MLTCIACTKQLNTNNGGSKKQEEDEEEEDRVIETPRSKQIKSLTSQIKDMAVKASGAYKSCKPCSGSSNQNKNRSYADSDVASNSGRFRYAYKRAGSGSSTPKILGKEMESRLKGFLSGEGTPESMSGRTESTVFMEEEDELKEWVAQVEPGVLITFVSLPEGGNDMKRIRFSREMFDKWQAQKWWAENFDKVMELYNVQQFNQQSVPLPTPPRSEDGSSRIQSTKNGPATPPLNKECSRGKGYASSGSLAHQPTTQTQSRHHDSSGLATTPKLSSISGTKTETSSVDESARSSFSREEEEADHSGEELSVSNASDIETEWVEQDEAGVYITIRALPDGTRELRRVRFSREKFGETNARLWWEQNRARIQQQYL

SEQ ID NO: 33428 - protein, 325 aa, Arabidopsis thaliana
  misc_feature (1)..(325): Ceres Seq. ID no. 13603081
MAVKASGAYKSCKPCSGSSNQNKNRSYADSDVASNSGRFRYAYKRAGSGSSTPKILGKEMESRLKGFLSGEGTPESMSGRTESTVFMEEEDELKEWVAQVEPGVLITFVSLPEGGNDMKRIRFSREMFDKWQAQKWWAENFDKVMELYNVQQFNQQSVPLPTPPRSEDGSSRIQSTKNGPATPPLNKECSRGKGYASSGSLAHQPTTQTQSRHHDSSGLATTPKLSSISGTKTETSSVDESARSSFSREEEEADHSGEELSVSNASDIETEWVEQDEAGVYITIRALPDGTRELRRVRFSREKFGETNARLWWEQNRARIQQQYL

SEQ ID NO: 33429 - protein, 266 aa, Arabidopsis thaliana
  misc_feature (1)..(266): Ceres Seq. ID no. 13603082
MESRLKGFLSGEGTPESMSGRTESTVFMEEEDELKEWVAQVEPGVLITFVSLPEGGNDMKRIRFSREMFDKWQAQKWWAENFDKVMELYNVQQFNQQSVPLPTPPRSEDGSSRIQSTKNGPATPPLNKECSRGKGYASSGSLAHQPTTQTQSRHHDSSGLATTPKLSSISGTKTETSSVDESARSSFSREEEEADHSGEELSVSNASDIETEWVEQDEAGVYITIRALPDGTRELRRVRFSREKFGETNARLWWEQNRARIQQQYL

SEQ ID NO: 33430 - DNA, 1719 bp, Arabidopsis thaliana
  misc_feature (1)..(1719): Ceres Seq. ID no. 13603083
atcttctacggacagcttctttctctttcctctctgattttttttttctctttctacctttttctttttttattttctttcttttttttttgttagtttttttttttttctttcttcatctcgtgaacgatatagtacctgaaccctagcggaggaaaatcaaaaattgtctaggagaaacaaacagagatatctttctttctttttatcagtggggaaaaaaaatgcagaatccgagactgaagcaacatcagcagcaacaacaacaacaagctatgatgcagcaacaagctctgatgcagcaacactctctttaccatcctggtgttttggctcctcctcagttagagcctgttccaagtggaaaccttcctcctggttttgatcccagtacttgccgtagcgtgtatgttggaaacatccatacacaggtcacagagcctttgcttcaagagatttttacaagcactggccctgttgaaagcagtaaactcatcagaaaggataagtcatcatatggatttgttcactactttgatcgaagatccgctgctctggctatactgtctctgaacggaaggcatctgtttggacagcctatcaaagtcaattgggcgtatgccactggtcagagggaagatacatcaagtcatttcaacatttttgttggagatctcagtccagaggtcactgatgcaacattatatcaaagcttttctgtcttttccagttgttcggatgcgagagttatgtgggaccaaaaaactgggcgctcgagaggctttgggtttgtttccttccgcaatcaacaggatgctcaaactgccattaatgagatgaatggtaagtggttaagtagcagacaaatcagatgcaactgggccacgaagggcgctacttctggtgatgataagctcagttctgatggaaaaagtgttgtggaacttacaactggctcatcagaggatggtaaagagacattaaatgaggaaacacctgaaaataattctcagtttaccactgtttatgtgggaaaccttgctccagaggtaactcagcttgatctacaccgttacttccatgctcttggcgctggagttattgaggaggtccgtgtccaacgagacaaaggctttggtttcgtgagatataacactcatcccgaagctgctcttgctattcagatgggtaacactcagccttacctctttaacagacagataaagtgctcatggggaaacaagccaactccaccaggtacagcctcaaacccacttcccccacctgccccagctccagttcctggtctatctgcagctgatctcctaaactatgagaggcaattggcacttagcaagatggcaagtgtgaatgcgttaatgcatcaacagggtcaacaccctctaaggcaggctcatggaataaatgccgctggagcaactgcagccatgtatgatggtggctttcagaatgtagccgccgcacagcaactcatgtactatcagtaataaacctcagttcgtggcgccgatctcaagtttcaatctctttgctttttctcttttttttttgtttgtctagaacttgtttgtgtgtgtctgtttgtctctcacttaagttatctatataaagttttatctgcagttgtatgattagttatgtattcccatggattgtaagacaagcgaattacattcaataaaagggatttggatatcc

SEQ ID NO: 33431 - protein, 427 aa, Arabidopsis thaliana
  misc_feature (1)..(427): Ceres Seq. ID no. 13603084
MQNPRLKQHQQQQQQQAMMQQQALMQQHSLYHPGVLAPPQLEPVPSGNLPPGFDPSTCRSVYVGNIHTQVTEPLLQEIFTSTGPVESSKLIRKDKSSYGFVHYFDRRSAALAILSLNGRHLFGQPIKVNWAYATGQREDTSSHFNIFVGDLSPEVTDATLYQSFSVFSSCSDARVMWDQKTGRSRGFGFVSFRNQQDAQTAINEMNGKWLSSRQIRCNWATKGATSGDDKLSSDGKSVVELTTGSSEDGKETLNEETPENNSQFTTVYVGNLAPEVTQLDLHRYFHALGAGVIEEVRVQRDKGFGFVRYNTHPEAALAIQMGNTQPYLFNRQIKCSWGNKPTPPGTASNPLPPPAPAPVPGLSAADLLNYERQLALSKMASVNALMHQQGQHPLRQAHGINAAGATAAMYDGGFQNVAAAQQLMYYQ

SEQ ID NO: 33432 - protein, 410 aa, Arabidopsis thaliana
  misc_feature (1)..(410): Ceres Seq. ID no. 13603085
MMQQQALMQQHSLYHPGVLAPPQLEPVPSGNLPPGFDPSTCRSVYVGNIHTQVTEPLLQEIFTSTGPVESSKLIRKDKSSYGFVHYFDRRSAALAILSLNGRHLFGQPIKVNWAYATGQREDTSSHFNIFVGDLSPEVTDATLYQSFSVFSSCSDARVMWDQKTGRSRGFGFVSFRNQQDAQTAINEMNGKWLSSRQIRCNWATKGATSGDDKLSSDGKSVVELTTGSSEDGKETLNEETPENNSQFTTVYVGNLAPEVTQLDLHRYFHALGAGVIEEVRVQRDKGFGFVRYNTHPEAALAIQMGNTQPYLFNRQIKCSWGNKPTPPGTASNPLPPPAPAPVPGLSAADLLNYERQLALSKMASVNALMHQQGQHPLRQAHGINAAGATAAMYDGGFQNVAAAQQLMYYQ

SEQ ID NO: 33433 - protein, 409 aa, Arabidopsis thaliana
  misc_feature (1)..(409): Ceres Seq. ID no. 13603086
MQQQALMQQHSLYHPGVLAPPQLEPVPSGNLPPGFDPSTCRSVYVGNIHTQVTEPLLQEIFTSTGPVESSKLIRKDKSSYGFVHYFDRRSAALAILSLNGRHLFGQPIKVNWAYATGQREDTSSHFNIFVGDLSPEVTDATLYQSFSVFSSCSDARVMWDQKTGRSRGFGFVSFRNQQDAQTAINEMNGKWLSSRQIRCNWATKGATSGDDKLSSDGKSVVELTTGSSEDGKETLNEETPENNSQFTTVYVGNLAPEVTQLDLHRYFHALGAGVIEEVRVQRDKGFGFVRYNTHPEAALAIQMGNTQPYLFNRQIKCSWGNKPTPPGTASNPLPPPAPAPVPGLSAADLLNYERQLALSKMASVNALMHQQGQHPLRQAHGINAAGATAAMYDGGFQNVAAAQQLMYYQ

SEQ ID NO: 33434 - DNA, 1636 bp, Arabidopsis thaliana
  misc_feature (1)..(1636): Ceres Seq. ID no. 13603095
ggagagtaacatcgagacaaagaagaaaaactaaaaaagagaaccccaaagaatcgaatatttattatttcgccccgaagattctatttctgatcatttacacccctaaaaagagtagagctttcgtgaagccaccatgtgtggaggagctataatctccgatttcatacctccgccgaggtccctccgcgtcactaacgagtttatctggccggatctgaaaaacaaagtgaaagcttcaaagaagagatcgaataagcgatccgatttcttcgatcttgacgatgatttcgaagctgatttccaagggtttaaggatgactcggcttttgactgcgaagacgatgatgatgtcttcgtcaatgttaagcctttcgtcttcaccgcaactactaagcccgtagcttccgctttcgtctccactggtatatatttggtaggttcagcatatgccaagaaaactgtagagtccgctgagcaagctgagaaatcttctaagaggaagaggaagaatcaataccgagggattaggcagcgtccttggggaaaatgggctgcggagatccgtgatccgagaaaaggctcccgagaatggcttggaacattcgacactgctgaggaagcagcaagagcttatgatgctgcagcacgcagaatccgtggcacgaaagctaaggtgaattttcccgaggagaagaaccctagcgtcgtatcccagaaacgtcctagtgctaagactaataatcttcagaaatcagtggctaaaccaaacaaaagcgtaactttggttcagcagccaacacatctgagtcagcagtactgcaacaactcctttgacaactcttttggtgatatgagtttcatggaagagaagcctcagatgtacaacaatcagtttgggttaacaaactcgttcgatgctggaggtaacaatggataccagtatttcagttccgatcagggcagtaactccttcgactgttctgagttcgggtggagtgatcacggccctaaaacacccgagatctcttcaatgcttgtcaataacaacgaagcatcatttgttgaagaaaccaatgcagccaagaagctcaaaccaaactctgatgagtcagacgatctgatggcataccttgacaacgccttgtgggacaccccactagaagtggaagccatgcttggcgcagatgctggtgctgtgactcaggaagaggaaaacccagtggagctatggagcttagatgagatcaatttcatgctggaaggagacttttgaagtgatcgatggttccttagtttgtaaataaagctgtgttggattttgctgttgggggatggtacaagtcacacctcaagctctatgcattggtatctcatgagcctctcttccatagagagtttctcttttaattttgtcgaaataaaaaaggtgtgatgaagtaaatagaggtataataatatctatctattaagtcttgttttgttctttcatttttgtatttcttttctatttaaaagacagtttattagtcttctgagctctctttttgatctttgttatagcgtatcatcaccctcgaaagtgtaatgttttgtacccccaaacttgtttagcattataataaagtctctttgg

SEQ ID NO: 33435 - protein, 379 aa, Arabidopsis thaliana
  misc_feature (1)..(379): Ceres Seq. ID no. 13603096
MCGGAIISDFIPPPRSLRVTNEFIWPDLKNKVKASKKRSNKRSDFFDLDDDFEADFQGFKDDSAFDCEDDDDVFVNVKPFVFTATTKPVASAFVSTGIYLVGSAYAKKTVESAEQAEKSSKRKRKNQYRGIRQRPWGKWAAEIRDPRKGSREWLGTFDTAEEAARAYDAAARRIRGTKAKVNFPEEKNPSVVSQKRPSAKTNNLQKSVAKPNKSVTLVQQPTHLSQQYCNNSFDNSFGDMSFMEEKPQMYNNQFGLTNSFDAGGNNGYQYFSSDQGSNSFDCSEFGWSDHGPKTPEISSMLVNNNEASFVEETNAAKKLKPNSDESDDLMAYLDNALWDTPLEVEAMLGADAGAVTQEEENPVELWSLDEINFMLEGDF

SEQ ID NO: 33436 - DNA, 2395 bp, Arabidopsis thaliana
  misc_feature (1)..(2395): Ceres Seq. ID no. 13603097
cttctgtctcatctggttttcgagagagatagagaaagtgagacaaggttaaggaggaagaagatgactgagaatcgggtggttttggctctgcttatactctgcattgttgggtttgagccaagtttcatccatggagctacggattcatcagatacttcggcgttaaacatcatgttcagctccatgaattctccaggacagctctcacaatggacagcatcaggaggtgatccttgtggccaaaactggaaaggcataacttgctctggctctcgagttacacaaataaagttaccaagtcttggactttctggatcacttggattcatgcttgataaattgacttctgttactgagtttgatatgagcaacaataaccttggaggcgatttgccttatcagcttcctccaaacttggagcgattgaatcttgctaataaccagttcactggatctgctcaatattccatttctatgatggctcctcttaagtacctcaaccttgctcacaaccagttgaagcagctagctattgacttcacaaaactcacctctctctctatattggacctctcttccaatgcttttatagggtctctcccaaacacttgtagctctcttacgagtgcaaaatcaatttatcttcagaacaatcagttctcaggcaccattgatattctagccacccttcctctcgaaaatctgaatattgcaaacaatcggttcacaggctggatccctgattctttgaaaggcattaacttgcaaaaagatggcaatttattaaattccgggcctgcacctccaccacctcctggtacaccaccgatcagtaaatcatcacctactccgaaatccgggaaccgtggaaaccgttccaatggtgattccagcaatagcaaagactccagcaaatcagggcttggagctggtggagtagcaggaatagtcatttctttgatagttgtaacagcagtcatagctttcttcttgatcaagagaaaaagatcaaagcggtcatcatccacggacattgaaaagactgataataacattaaccaacccattatactagcgtccaatgactttcatcaagagaataagtctgtacagaatccaccattggttgagacaaagaaactggatacgtcattgtcgatgaatctacgtcctccaccatctgagcgacataagtcgtttgatgacgatgattcaacaatgagaaaacctattgttgcaaagaaagctgctgttgttgttccttcaaatgtgaacacatatacggtttcagatcttcaagtagctaccaacagtttcagcgtagataatcttctcggtgaaggaacatttggaagagtatacagagctcagtttgaagatggaaaggtacttgctgtgaagaaaatcgactcatctgcgcttcccacggatactgctgatgattttaccgaaattgtatcgaaaatagcgcatttggatcacgaaaatgtcacaaagcttgatggttactgttctgaacacgggcaacacttggtggtctatgagttccatagaaacggctcattgcatgactttttacatcttgcagaagaggaaagcaaaccgttgatatggaatccccgtgtcaagatcgctcttggcactgcacgtgcattggagtacttgcatgaagtttgctcaccatctatagtccacaagaacattaaatcagcaaatattttacttgactcagagctgaatccacacctctcagactcaggtctcgctagcttccttcccactgcaaacgagctactaaaccaaaacgatgaaggatacagcgcaccagaaacttcaatgtcaggccaatactctttgaagagcgatgtttacagttttggagtagtgatgctcgagcttttaaccggaagaaaaccattcgacagcacaaggtcaagatcggaacaatcattggtaagatgggcaacacctcagcttcacgacattgatgctttgggcaaaatggttgatccagctctcaaagggctatacccggttaaatccctctcccgatttgcagatgttatcgccctttgcgtccagccggagccagagtttagaccacccatgtctgaagtggtgcaagcattggttgtattggtgcagagagctaacatgagcaagagaactgttggagtcggctccggtagctccggcgtcaatgattacatgtaaattctttacctgatgagaaccaacaaaaaaaaacataaaaatttgccctttttctcttgtctgctcggaatctggatgggacgacaacaagtgacaaccgaggacagacaaaacaaaacaaaatcctttttttctttcggtttcataaaactgatgatgagagaataacaacaacaac

SEQ ID NO: 33437 - protein, 738 aa, Arabidopsis thaliana
  misc_feature (1)..(738): Ceres Seq. ID no. 13603098
LLSHLVFERDRESETRLRRKKMTENRVVLALLILCIVGFEPSFIHGATDSSDTSALNIMFSSMNSPGQLSQWTASGGDPCGQNWKGITCSGSRVTQIKLPSLGLSGSLGFMLDKLTSVTEFDMSNNNLGGDLPYQLPPNLERLNLANNQFTGSAQYSISMMAPLKYLNLAHNQLKQLAIDFTKLTSLSILDLSSNAFIGSLPNTCSSLTSAKSIYLQNNQFSGTIDILATLPLENLNIANNRFTGWIPDSLKGINLQKDGNLLNSGPAPPPPPGTPPISKSSPTPKSGNRGNRSNGDSSNSKDSSKSGLGAGGVAGIVISLIVVTAVIAFFLIKRKRSKRSSSTDIEKTDNNINQPIILASNDFHQENKSVQNPPLVETKKLDTSLSMNLRPPPSERHKSFDDDDSTMRKPIVAKKAAVVVPSNVNTYTVSDLQVATNSFSVDNLLGEGTFGRVYRAQFEDGKVLAVKKIDSSALPTDTADDFTEIVSKIAHLDHENVTKLDGYCSEHGQHLVVYEFHRNGSLHDFLHLAEEESKPLIWNPRVKIALGTARALEYLHEVCSPSIVHKNIKSANILLDSELNPHLSDSGLASFLPTANELLNQNDEGYSAPETSMSGQYSLKSDVYSFGVVMLELLTGRKPFDSTRSRSEQSLVRWATPQLHDIDALGKMVDPALKGLYPVKSLSRFADVIALCVQPEPEFRPPMSEVVQALVVLVQRANMSKRTVGVGSGSSGVNDYM

SEQ ID NO: 33438 - protein, 717 aa, Arabidopsis thaliana
  misc_feature (1)..(717): Ceres Seq. ID no. 13603099
MTENRVVLALLILCIVGFEPSFIHGATDSSDTSALNIMFSSMNSPGQLSQWTASGGDPCGQNWKGITCSGSRVTQIKLPSLGLSGSLGFMLDKLTSVTEFDMSNNNLGGDLPYQLPPNLERLNLANNQFTGSAQYSISMMAPLKYLNLAHNQLKQLAIDFTKLTSLSILDLSSNAFIGSLPNTCSSLTSAKSIYLQNNQFSGTIDILATLPLENLNIANNRFTGWIPDSLKGINLQKDGNLLNSGPAPPPPPGTPPISKSSPTPKSGNRGNRSNGDSSNSKDSSKSGLGAGGVAGIVISLIVVTAVIAFFLIKRKRSKRSSSTDIEKTDNNINQPIILASNDFHQENKSVQNPPLVETKKLDTSLSMNLRPPPSERHKSFDDDDSTMRKPIVAKKAAVVVPSNVNTYTVSDLQVATNSFSVDNLLGEGTFGRVYRAQFEDGKVLAVKKIDSSALPTDTADDFTEIVSKIAHLDHENVTKLDGYCSEHGQHLVVYEFHRNGSLHDFLHLAEEESKPLIWNPRVKIALGTARALEYLHEVCSPSIVHKNIKSANILLDSELNPHLSDSGLASFLPTANELLNQNDEGYSAPETSMSGQYSLKSDVYSFGVVMLELLTGRKPFDSTRSRSEQSLVRWATPQLHDIDALGKMVDPALKGLYPVKSLSRFADVIALCVQPEPEFRPPMSEVVQALVVLVQRANMSKRTVGVGSGSSGVNDYM

SEQ ID NO: 33439 - protein, 680 aa, Arabidopsis thaliana
  misc_feature (1)..(680): Ceres Seq. ID no. 13603100
MFSSMNSPGQLSQWTASGGDPCGQNWKGITCSGSRVTQIKLPSLGLSGSLGFMLDKLTSVTEFDMSNNNLGGDLPYQLPPNLERLNLANNQFTGSAQYSISMMAPLKYLNLAHNQLKQLAIDFTKLTSLSILDLSSNAFIGSLPNTCSSLTSAKSIYLQNNQFSGTIDILATLPLENLNIANNRFTGWIPDSLKGINLQKDGNLLNSGPAPPPPPGTPPISKSSPTPKSGNRGNRSNGDSSNSKDSSKSGLGAGGVAGIVISLIVVTAVIAFFLIKRKRSKRSSSTDIEKTDNNINQPIILASNDFHQENKSVQNPPLVETKKLDTSLSMNLRPPPSERHKSFDDDDSTMRKPIVAKKAAVVVPSNVNTYTVSDLQVATNSFSVDNLLGEGTFGRVYRAQFEDGKVLAVKKIDSSALPTDTADDFTEIVSKIAHLDHENVTKLDGYCSEHGQHLVVYEFHRNGSLHDFLHLAEEESKPLIWNPRVKIALGTARALEYLHEVCSPSIVHKNIKSANILLDSELNPHLSDSGLASFLPTANELLNQNDEGYSAPETSMSGQYSLKSDVYSFGVVMLELLTGRKPFDSTRSRSEQSLVRWATPQLHDIDALGKMVDPALKGLYPVKSLSRFADVIALCVQPEPEFRPPMSEVVQALVVLVQRANMSKRTVGVGSGSSGVNDYM

SEQ ID NO: 33440 - DNA, 1431 bp, Arabidopsis thaliana
  misc_feature (1)..(1431): Ceres Seq. ID no. 13603101
cacacacttcatctctccccagagctctattcccatcaagaaacacacttcggaagatggagatcactaacgttaccgagtatgatgcaatcgcaaagcagaagctgcctaagatggtgtacgactactatgcatctggtgcagaagaccaatggactcttcaagagaacagaaacgcttttgcaaggatcctctttcggcctcggattctgattgatgtgagcaagattgacatgacaaccaccgtcttggggttcaagatctcgatgcccatcatggttgctccaactgccatgcaaaagatggctcaccctgatggggaatatgctactgctagagctgcatctgcagctggaactatcatgacactatcttcatgggctacttccagcgttgaagaagttgcgtctacagggccagggatccgattcttccagctctatgtatacaagaacaggaatgtggttgagcagctcgtgagaagagctgagagggctgggttcaaagccattgctctcactgtagacaccccaaggctaggccgcagagagtctgatatcaagaacagattcactttgcctccaaacctgacattgaagaactttgaaggacttgacctcggaaagatggacgaggccaatgactctggcttggcttcatatgttgctggtcaaattgaccgtaccttaagctggaaggatgtccagtggctccagacaatcaccaagttgcccattcttgtcaaaggtgttcttacaggagaggatgcaaggatagcgattcaagctggtgcagccggaatcattgtatcaaaccatggagctcgccagcttgactatgtcccagcaaccatctcggcccttgaagaggttgtcaaagcgacacaaggacgaattcctgtcttcttggatggtggtgttcgacgtggcactgatgtcttcaaagcacttgcacttggagcctccgggatatttattggaagaccagtggtattctcattggcagctgaaggagaggctggagttagaaaggtgcttcaaatgctacgtgatgagttcgagctgaccatggcactgagtgggtgtcggtccctaaaggaaatctcccgtaaccacattaccaccgaatgggacactccacgtccttcagccaggttatagagaggaaaataaccaacaagcagagaacagcagcaacacagaaccaaaatattggctaaacttattcatactctgattgtacttggcttctactctgctaaatatctcaagacttgtttctccctctatcagatcacaaaccaagcctagtgattctgtaatactatttggctacttctttcttaaggccattcttatttctaaattccatgtacttacattcccacagatcaatttcttgtgattcccagataatacgatgaacatatgc

SEQ ID NO: 33441 - protein, 385 aa, Arabidopsis thaliana
  misc_feature (1)..(385): Ceres Seq. ID no. 13603102
HTSSLPRALFPSRNTLRKMEITNVTEYDAIAKQKLPKMVYDYYASGAEDQWTLQENRNAFARILFRPRILIDVSKIDMTTTVLGFKISMPIMVAPTAMQKMAHPDGEYATARAASAAGTIMTLSSWATSSVEEVASTGPGIRFFQLYVYKNRNVVEQLVRRAERAGFKAIALTVDTPRLGRRESDIKNRFTLPPNLTLKNFEGLDLGKMDEANDSGLASYVAGQIDRTLSWKDVQWLQTITKLPILVKGVLTGEDARIAIQAGAAGIIVSNHGARQLDYVPATISALEEVVKATQGRIPVFLDGGVRRGTDVFKALALGASGIFIGRPVVFSLAAEGEAGVRKVLQMLRDEFELTMALSGCRSLKEISRNHITTEWDTPRPSARL

SEQ ID NO: 33442 - protein, 367 aa, Arabidopsis thaliana
  misc_feature (1)..(367): Ceres Seq. ID no. 13603103
MEITNVTEYDAIAKQKLPKMVYDYYASGAEDQWTLQENRNAFARILFRPRILIDVSKIDMTTTVLGFKISMPIMVAPTAMQKMAHPDGEYATARAASAAGTIMTLSSWATSSVEEVASTGPGIRFFQLYVYKNRNVVEQLVRRAERAGFKAIALTVDTPRLGRRESDIKNRFTLPPNLTLKNFEGLDLGKMDEANDSGLASYVAGQIDRTLSWKDVQWLQTITKLPILVKGVLTGEDARIAIQAGAAGIIVSNHGARQLDYVPATISALEEVVKATQGRIPVFLDGGVRRGTDVFKALALGASGIFIGRPVVFSLAAEGEAGVRKVLQMLRDEFELTMALSGCRSLKEISRNHITTEWDTPRPSARL

SEQ ID NO: 33443 - protein, 348 aa, Arabidopsis thaliana
  misc_feature (1)..(348): Ceres Seq. ID no. 13603104
MVYDYYASGAEDQWTLQENRNAFARILFRPRILIDVSKIDMTTTVLGFKISMPIMVAPTAMQKMAHPDGEYATARAASAAGTIMTLSSWATSSVEEVASTGPGIRFFQLYVYKNRNVVEQLVRRAERAGFKAIALTVDTPRLGRRESDIKNRFTLPPNLTLKNFEGLDLGKMDEANDSGLASYVAGQIDRTLSWKDVQWLQTITKLPILVKGVLTGEDARIAIQAGAAGIIVSNHGARQLDYVPATISALEEVVKATQGRIPVFLDGGVRRGTDVFKALALGASGIFIGRPVVFSLAAEGEAGVRKVLQMLRDEFELTMALSGCRSLKEISRNHITTEWDTPRPSARL

SEQ ID NO: 33444 - DNA, 1073 bp, Arabidopsis thaliana
  misc_feature (1)..(1073): Ceres Seq. ID no. 13603112
ctctctctgttgctaaaaacatttagatcgcttacctggttcgtgcacctgattagctgctgttatttctttttcttcccagagttcaggtcgttaaaaatctaatcttttttggtgggtgaagactcttctttatcaaatcaacctaatttctcagattctcagatctcaagagttttgtttttttagcaacaatgaataaaaatccacggctcgatttttcctcaccgtcgtcgttagccactatctccgactctgcagacggtgagctgaatgaagacgacatctttgcaatcgacatatctcacgcgccgcctcaagctcgtcattctcctgtatcatctccggcgaagcaacaaactcctgctcgtcagcttcagaggagcaaaagcggtttgaagaatgtggaagcgtctggtatcctcgcggctcttcctgaatcatctgggagtagtagttacttaagtcatgtctttcaccacaaacctgcggctgctctctctacttctgtctcctccacagcttcttcatcgtcttcttcaggtggtggtgcatcagctggttcttcgtcttcagctcgagctatcccgaccgcgcctaaaccgcctcaagagaggcttccgttttcagcttcttttgtaggtggtgggaagtatcctcaatcagctccggttcaagtgccgttagtgtcgtctgcgatgatgaatcgtcataagaaggaattcaagctgactgatgtggtggatgatgatgaggaagaagaggaaggcgaaatgcttccgcctcacgagattgtagctcggtctttggctcagtcgtcgttgttatcttgctctgtgcttgaaggagcaggaaggacacttaaagggagagatctccggcaggtaaggaatgctgttttcagaagaaccggtttcatagattgagtgtttttttttttactctcttcttcagaaagacgattctttaatttgttatcccaattgatgaactactttatcccttatttggccacagaaacttgtcaatgtgtatgttcatatgttgtctacgttagacgatttgtttacttc

SEQ ID NO: 33445 - protein, 243 aa, Arabidopsis thaliana
  misc_feature (1)..(243): Ceres Seq. ID no. 13603113
MNKNPRLDFSSPSSLATISDSADGELNEDDIFAIDISHAPPQARHSPVSSPAKQQTPARQLQRSKSGLKNVEASGILAALPESSGSSSYLSHVFHHKPAAALSTSVSSTASSSSSSGGGASAGSSSSARAIPTAPKPPQERLPFSASFVGGGKYPQSAPVQVPLVSSAMMNRHKKEFKLTDVVDDDEEEEEGEMLPPHEIVARSLAQSSLLSCSVLEGAGRTLKGRDLRQVRNAVFRRTGFID

SEQ ID NO: 33446 - DNA, 1404 bp, Arabidopsis thaliana
  misc_feature (1)..(1404): Ceres Seq. ID no. 13603114
gcatcaacgaagaagaagaagaaaaggacgagtagattgatttcttagacgacggagaaatgcgagtgatgagatcattgcgcggtaattccggtgctggattggttttccggccggcgaggttaaattctcttcggagcgtctttaccggttgccgtgctgtgattttgccccgctttggtggtccggaggtttttgagctccgggagaatgttccggtgccgaatctgaatccaaatgaggttcttgtcaaggcgaaagctgtctccgttaatcctcttgattgcagaatacgagctggatatggacgttctgtattccaaccgcatctacctattatagttggacgtgatgtcagtggtgaagttgcggcaattgggacttcagtaaagtcacttaaagtaggacaagaagtttttggtgcgttgcatccgacggcgttaagaggtacttatactgactatggaattctttcggaagacgaactcacggaaaagccatcatcaatttcacatgtggaagcaagtgccattccttttgcagctttgactgcttggcgtgctttgaagagtaatgcaaggataactgaaggacaaagactattagtctttggaggaggaggagcagtaggtttttctgcaatccagcttgcggtagcatctgggtgtcatgttacagcctcttgtgttggtcagactaaagacagaatacttgcagctggggccgagcaagctgttgactacacaaccgaggacattgagttggcggtaaaaggaaaatttgatgccgtgttagatactattggtgggcctgaaacggagagaataggcattaacttcttaaggaagggtggaaactatatgactcttcagggtgaggctgcatcgttgactgataaatacggttttgtggttgggcttccccttgcaacatcgctcttgatgaagaaaaagatacaatatcagtattctcatggaatagactattggtggacgtatatgagggctgatcctgaaggtctagccgagattcagcgtttagttggagctggaaagctaaaaatacctgttgaaaaaacatttccaataaccgatgttgtagcagctcatgaagccaaggagaagaaacagattccgggtaaggtggttctagagttctgaactacatatacatagtagaaataataacacctgcatagttctctagcagttgttctttctagaatttacacgcagagaaacaaatgtttcgcgtctggagttttctgtaaatgagatctatcaggcttagattcagatcaagaacttgaagtgtctgtatagactttccaaagggttcgtttttatttggattttgtctgtgttgcaaactactaagccaagtaatggaaatggtttagaaaga

SEQ ID NO: 33447 - protein, 366 aa, Arabidopsis thaliana
  misc_feature (1)..(366): Ceres Seq. ID no. 13603115
MRVMRSLRGNSGAGLVFRPARLNSLRSVFTGCRAVILPRFGGPEVFELRENVPVPNLNPNEVLVKAKAVSVNPLDCRIRAGYGRSVFQPHLPIIVGRDVSGEVAAIGTSVKSLKVGQEVFGALHPTALRGTYTDYGILSEDELTEKPSSISHVEASAIPFAALTAWRALKSNARITEGQRLLVFGGGGAVGFSAIQLAVASGCHVTASCVGQTKDRILAAGAEQAVDYTTEDIELAVKGKFDAVLDTIGGPETERIGINFLRKGGNYMTLQGEAASLTDKYGFVVGLPLATSLLMKKKIQYQYSHGIDYWWTYMRADPEGLAEIQRLVGAGKLKIPVEKTFPITDVVAAHEAKEKKQIPGKVVLEF

SEQ ID NO: 33448 - protein, 363 aa, Arabidopsis thaliana
  misc_feature (1)..(363): Ceres Seq. ID no. 13603116
MRSLRGNSGAGLVFRPARLNSLRSVFTGCRAVILPRFGGPEVFELRENVPVPNLNPNEVLVKAKAVSVNPLDCRIRAGYGRSVFQPHLPIIVGRDVSGEVAAIGTSVKSLKVGQEVFGALHPTALRGTYTDYGILSEDELTEKPSSISHVEASAIPFAALTAWRALKSNARITEGQRLLVFGGGGAVGFSAIQLAVASGCHVTASCVGQTKDRILAAGAEQAVDYTTEDIELAVKGKFDAVLDTIGGPETERIGINFLRKGGNYMTLQGEAASLTDKYGFVVGLPLATSLLMKKKIQYQYSHGIDYWWTYMRADPEGLAEIQRLVGAGKLKIPVEKTFPITDVVAAHEAKEKKQIPGKVVLEF

SEQ ID NO: 33449 - DNA, 1751 bp, Arabidopsis thaliana
  misc_feature (1)..(1751): Ceres Seq. ID no. 13603121
attcagcttgctcgcaacgaaacatattttgttggaaaaaaaaaacaaaggaaatcgccatggaagacgttaaccagttgttcgatgctgctttcgagttcgcacactatcccggcgctcaaaacgaaacttccgttaaggaattcctcgatcgcttccctcttcctgttatcttcaatgctttgcaaaccgatccggatataccaggatttgaaaacacgttggtgacttgcttggagaggttgtttaagactaagtatggcgcttcacttattcctcagtatatgcctgttctgcaagttggtctcaaggcagattctgcagttgtgaaatctctggcttgcaaaactgttctgtgtctcttggaggattgcgatacaaacgacgtttcttctgttcagctagttgttaacaatggcatataccctcttctacttgactatatcattaacagcgatgatgaagttgcaaatgctgcaagtgagacaattaagagcctagctcgctttccagatgcaatgtccgtaattttcccttctgaaaccaacgatcctacacatcttcgtaaccttgctgcaaggtgttcatcactggcacgagtccgggttttgtcgttgatagtgaagcttttttcgatttctcgacttgtagcttcagaagttaagaaatcggggcttcttgatttactggaggcagaaatgaagggtacaaaagacactcttgtgatcttaaatgttctggaactctactatgagttaatggaagtggagcacagttcagagttcgtgccacaaacatcacttattcagctgttgtgttctatcatcagtggtacatcgacgggaccctatgaaaagttaagagcaatgatgataagtggcagactactctcaaaggaaaatatctacaaagtcgtggaagaagctagtgtgaaggcgttaatttcagctattgatgggagtctggagtcagttgagatgaatgatactgatgcacaggaagctgccattgatgcacttggtcagatgggatcaacaacgaagggagcggatcttgtcctttcaacttcacctccagctgcaagacatgttgtagcttctgcctttgatcgtaatgcacatggaaaacagttggctgcactgcatgcactggcaaacatcgcaggtgaaacacgacctaagagcaacagaatagttgatggaaaagctgaagaaagccttagatgtttgatatacgacgctgcagcacagagcacaaaactaaccccatccggtttattcctctcagttcttcaacaaagctcagagattcgtcttgcgggttatcgaacgttaacagcattagtggctcggccatggtgcctggtggaaatcttggccaaagaagagataataaacatagttacggatgcaaccactgaaactgcaaaaatagcaatggaagcaaggtataactgctgcaaagcaattcacgaagcgttcttgtgtagtaactttgttgatgaccctcgtcgtctaaaaaccggtgacaagttgcaagaagctgttcgaagtggaccatatatgtcgaagaagcacagaggcgcacgaccagaagtaatgacaggcgaaggattttaaagacaactaaagaaaaaaagttaaaacttctttgttaaccaaagttttttatatcttctctggctgttcgataagtaaactttagttctttctataaacaacgaaggctaggagtaaacgttttggcggttg

SEQ ID NO: 33450 - protein, 538 aa, Arabidopsis thaliana
  misc_feature (1)..(538): Ceres Seq. ID no. 13603122
SACSQRNIFCWKKKTKEIAMEDVNQLFDAAFEFAHYPGAQNETSVKEFLDRFPLPVIFNALQTDPDIPGFENTLVTCLERLFKTKYGASLIPQYMPVLQVGLKADSAVVKSLACKTVLCLLEDCDTNDVSSVQLVVNNGIYPLLLDYIINSDDEVANAASETIKSLARFPDAMSVIFPSETNDPTHLRNLAARCSSLARVRVLSLIVKLFSISRLVASEVKKSGLLDLLEAEMKGTKDTLVILNVLELYYELMEVEHSSEFVPQTSLIQLLCSIISGTSTGPYEKLRAMMISGRLLSKENIYKVVEEASVKALISAIDGSLESVEMNDTDAQEAAIDALGQMGSTTKGADLVLSTSPPAARHVVASAFDRNAHGKQLAALHALANIAGETRPKSNRIVDGKAEESLRCLIYDAAAQSTKLTPSGLFLSVLQQSSEIRLAGYRTLTALVARPWCLVEILAKEEIINIVTDATTETAKIAMEARYNCCKAIHEAFLCSNFVDDPRRLKTGDKLQEAVRSGPYMSKKHRGARPEVMTGEGF

SEQ ID NO: 33451 - protein, 519 aa, Arabidopsis thaliana
  misc_feature (1)..(519): Ceres Seq. ID no. 13603123
MEDVNQLFDAAFEFAHYPGAQNETSVKEFLDRFPLPVIFNALQTDPDIPGFENTLVTCLERLFKTKYGASLIPQYMPVLQVGLKADSAVVKSLACKTVLCLLEDCDTNDVSSVQLVVNNGIYPLLLDYIINSDDEVANAASETIKSLARFPDAMSVIFPSETNDPTHLRNLAARCSSLARVRVLSLIVKLFSISRLVASEVKKSGLLDLLEAEMKGTKDTLVILNVLELYYELMEVEHSSEFVPQTSLIQLLCSIISGTSTGPYEKLRAMMISGRLLSKENIYKVVEEASVKALISAIDGSLESVEMNDTDAQEAAIDALGQMGSTTKGADLVLSTSPPAARHVVASAFDRNAHGKQLAALHALANIAGETRPKSNRIVDGKAEESLRCLIYDAAAQSTKLTPSGLFLSVLQQSSEIRLAGYRTLTALVARPWCLVEILAKEEIINIVTDATTETAKIAMEARYNCCKAIHEAFLCSNFVDDPRRLKTGDKLQEAVRSGPYMSKKHRGARPEVMTGEGF

SEQ ID NO: 33452 - protein, 444 aa, Arabidopsis thaliana
  misc_feature (1)..(444): Ceres Seq. ID no. 13603124
MPVLQVGLKADSAVVKSLACKTVLCLLEDCDTNDVSSVQLVVNNGIYPLLLDYIINSDDEVANAASETIKSLARFPDAMSVIFPSETNDPTHLRNLAARCSSLARVRVLSLIVKLFSISRLVASEVKKSGLLDLLEAEMKGTKDTLVILNVLELYYELMEVEHSSEFVPQTSLIQLLCSIISGTSTGPYEKLRAMMISGRLLSKENIYKVVEEASVKALISAIDGSLESVEMNDTDAQEAAIDALGQMGSTTKGADLVLSTSPPAARHVVASAFDRNAHGKQLAALHALANIAGETRPKSNRIVDGKAEESLRCLIYDAAAQSTKLTPSGLFLSVLQQSSEIRLAGYRTLTALVARPWCLVEILAKEEIINIVTDATTETAKIAMEARYNCCKAIHEAFLCSNFVDDPRRLKTGDKLQEAVRSGPYMSKKHRGARPEVMTGEGF

SEQ ID NO: 33453 - DNA, 1060 bp, Arabidopsis thaliana
  misc_feature (1)..(1060): Ceres Seq. ID no. 13603125
ttcaattatctatcacaccaccactctctctctaatctatctatccgagaatggccaagatgggcttgaaacccgacccggctactactaaccagacccacaataatgccaaggagattcgttacagaggcgttaggaagcgtccttggggccgttatgccgccgagatccgagatccgggcaagaaaacccgcgtctggcttggcactttcgatacggctgaagaggcggcgcgtgcttacgatacggcggcgcgtgattttcgtggtgctaaggctaagaccaatttcccaacttttctcgagctgagtgaccagaaggtccctaccggtttcgcgcgtagccctagccagagcagcacgctcgactgtgcttctcctccgacgttagttgtgccttcagcgacggctgggaatgttcccccgcagctcgagcttagtctcggcggaggaggcggcggctcgtgttatcagatcccgatgtcgcgtcctgtctactttttggacctgatggggatcggtaacgtaggtcgtggtcagcctcctcctgtgacatcggcgtttagatcgccggtggtgcatgttgcgacgaagatggcttgtggtgcccaaagcgactctgattcgtcatcggtcgttgatttcgaaggtgggatggagaagagatctcagctgttagatctagatcttaatttgcctcctccatcggaacaggcctgagcttttaacggtgtcgtttcaattcgaagcgcatgcgtttcttcttctttttgagctgtgaaaattcgttttctcatagtttttcctctctctctctctcagtctaaatttattaccagtttttagaaagaaaaaacagattaaatctgagagagaaaaatataattttagctgacatggatcgttatgtacatattattacataaccggagatctgaacttttgttgtgtgcttttaattttttgcgacttggtttcaccccatgttgtttctctattttttttactactttttttttttttgttcttccaaattttcaatcaataatttggtaatcttc

SEQ ID NO: 33454 - protein, 222 aa, Arabidopsis thaliana; identical to SEQ ID NO: 32134
  misc_feature (1)..(222): Ceres Seq. ID no. 13603126

SEQ ID NO: 33455 - protein, 219 aa, Arabidopsis thaliana; identical to SEQ ID NO: 32135
  misc_feature (1)..(219): Ceres Seq. ID no. 13603127

SEQ ID NO: 33456 - DNA, 1912 bp, Arabidopsis thaliana
  misc_feature (1)..(1912): Ceres Seq. ID no. 13603138
atctccaaaccaaaacacaattaagctaaaaaaaaaaccaaaggatgtctcagaaactcatgttcttgttcacccttgcctgcctctcctcgttaccatctccttttatctccgcccaaataccggccattggaaatgccacttcaccgtcaaatatatgtagattcgcgccggatccatcttattgtagatcggttcttccaaaccagcccggagatatatattcctacggacgtttgtctctacgaagatccctctcacgagcccgccggttcatttcgatgatcgacgctgaacttgaccggaaaggcaaagtggctgctaaatccacagtaggggctctcgaagactgcaaattcctagccagcctgactatggactacctccttagtagctcacagacggctgattccaccaaaacactgtcgttatctagggccgaggatgttcatacatttctgagtgctgccatcaccaatgagcagacttgtcttgaaggacttaaatcaacggcgtccgaaaatggtctttccggtgatcttttcaacgatacaaaactctatggggtgtctcttgcccttttctccaaaggttgggtgccaagaaggcaaagatcgagaccgatttggcaaccacaagccaggttcaaaaagttttttggtttccgtaacggtaaattaccgttaaagatgacggaaagggcacgtgccgtttacaacaccgtgactagaagaaagcttctccaatcggatgcagacgccgttcaggtgagcgacattgtgacggtgatccagaacgggacgggaaacttcacgaccataaacgccgccattgcagctgcaccaaataaaactgacggtagtaacggttacttcttgatctacgtaacggcgggattgtacgaggaatacgtggaagttcccaagaacaagagatatgtgatgatgatcggtgacggcatcaaccagaccgttatcaccggaaacaggagtgtcgttgatggatggacaactttcaattcagccacatttattctatcaggtcccaactttattggtgtaaacataacaatccgcaatacggcaggaccaaccaaaggccaagctgtggcattgaggagtggtggggacttgtctgttttctacagttgtagttttgaagcctatcaagacacgttatacacacattctctcagacagttttatcgtgaatgtgatgtctatggtactgttgattttatatttggtaacgctgcagtggtattacaaaactgtaatttgtatccacgtcaacctcgcaaaggtcaatcgaacgaggttacggctcaaggtcgtactgatccgaaccaaaacactgggacggcaattcatggttgtactataagaccggcagatgatttggctacgagcaactatacagtgaagacttatcttggtcgaccatggaaggaatattctagaaccgttgtcatgcaaacttacatagacgggtttctagaaccgagtggttggaatgcatggtctggtgattttgcattgagcacactttactacgcggaatataataataccggacctggttctgacacgacaaaccgagtcacttggcctggttatcacgtcatcaacgcaactgatgcttccaatttcacggtcaccaatttccttgttggtgaaggttggattggacaaaccggagtgcctttcgtgggtggactgatcgcataatcaaccaaccttatactatatatgatatgttaattagttaaattatttaatcattcatgtgttgtttttttaatcaaataattatttagtggtgcctgattcaatacgatttgtaataactttaacttactattgtacaaccgaatggttttcttcgaaatctaataataatgaacgggtaatca

SEQ ID NO: 33457 - protein, 560 aa, Arabidopsis thaliana
  misc_feature (1)..(560): Ceres Seq. ID no. 13603139
MSQKLMFLFTLACLSSLPSPFISAQIPAIGNATSPSNICRFAPDPSYCRSVLPNQPGDIYSYGRLSLRRSLSRARRFISMIDAELDRKGKVAAKSTVGALEDCKFLASLTMDYLLSSSQTADSTKTLSLSRAEDVHTFLSAAITNEQTCLEGLKSTASENGLSGDLFNDTKLYGVSLALFSKGWVPRRQRSRPIWQPQARFKKFFGFRNGKLPLKMTERARAVYNTVTRRKLLQSDADAVQVSDIVTVIQNGTGNFTTINAAIAAAPNKTDGSNGYFLIYVTAGLYEEYVEVPKNKRYVMMIGDGINQTVITGNRSVVDGWTTFNSATFILSGPNFIGVNITIRNTAGPTKGQAVALRSGGDLSVFYSCSFEAYQDTLYTHSLRQFYRECDVYGTVDFIFGNAAVVLQNCNLYPRQPRKGQSNEVTAQGRTDPNQNTGTAIHGCTIRPADDLATSNYTVKTYLGRPWKEYSRTVVMQTYIDGFLEPSGWNAWSGDFALSTLYYAEYNNTGPGSDTTNRVTWPGYHVINATDASNFTVTNFLVGEGWIGQTGVPFVGGLIA

SEQ ID NO: 33458 - protein, 555 aa, Arabidopsis thaliana
  misc_feature (1)..(555): Ceres Seq. ID no. 13603140
MFLFTLACLSSLPSPFISAQIPAIGNATSPSNICRFAPDPSYCRSVLPNQPGDIYSYGRLSLRRSLSRARRFISMIDAELDRKGKVAAKSTVGALEDCKFLASLTMDYLLSSSQTADSTKTLSLSRAEDVHTFLSAAITNEQTCLEGLKSTASENGLSGDLFNDTKLYGVSLALFSKGWVPRRQRSRPIWQPQARFKKFFGFRNGKLPLKMTERARAVYNTVTRRKLLQSDADAVQVSDIVTVIQNGTGNFTTINAAIAAAPNKTDGSNGYFLIYVTAGLYEEYVEVPKNKRYVMMIGDGINQTVITGNRSVVDGWTTFNSATFILSGPNFIGVNITIRNTAGPTKGQAVALRSGGDLSVFYSCSFEAYQDTLYTHSLRQFYRECDVYGTVDFIFGNAAVVLQNCNLYPRQPRKGQSNEVTAQGRTDPNQNTGTAIHGCTIRPADDLATSNYTVKTYLGRPWKEYSRTVVMQTYIDGFLEPSGWNAWSGDFALSTLYYAEYNNTGPGSDTTNRVTWPGYHVINATDASNFTVTNFLVGEGWIGQTGVPFVGGLIA

SEQ ID NO: 33459 - protein, 481 aa, Arabidopsis thaliana; identical to SEQ ID NO: 31400
  misc_feature (1)..(481): Ceres Seq. ID no. 13603141

SEQ ID NO: 33460 - DNA, 1456 bp, Arabidopsis thaliana
  misc_feature (1)..(1456): Ceres Seq. ID no. 13603173
gtctctctcccggagatctctctttctcttcttctccatccttcttctctcggcgcgcgcttcatccccaccaccttcgaattcgtgccctttgagggaagctgctaggatgggtgtgaagcaggctctaaggagcattgatgcgtttccaagagcagaggatcatttgcttcagaagacacaatctggcgctgttgtatctattgttggacttcttataatggctactttgttcttacacgagctgagttattatcttaacacacttacagtgcaccagatgtcagtggacttaaagcgtggagaaactcttccaattcatgtaaatatgacgtttccatctttaccttgtgatgtactgagcgtagatgctatcgacatgtcagggaagcatgaagtggatcttgatacaaacatttggaagctccgtctcaacagtcatggtcatatcataggcacagaatatatatctgatcttgttgaaaaggggcatgagcatggccactcacctcacaagcatgatggcaaagaagaacacaagaatgagactgaaaccgaagcattgaatattcttggctttgaccaagctgctgagactatgattaaaaaagtgaagcaagcattggcagatggagaaggatgtcgggtttatggtgtcctagatgtacaacgggttgccggaaacttccatatttcagttcatgggctgaacatctatgttgctcagatgatatttggcgggtccaaaaacgtaaacgtgagccatatgattcacgatctatcatttgggccgaaataccccggaattcacaacccacttgatgacaccaaccgaatactccatgacaccagtggaacattcaaatactatattaagattgttcccacagaatatagatatctttcaaaagacgtactgtcaacaaatcagtactctgtaactgaatatttcacgccaatgactgaattcgaccgtacatggccagctgtttacttcttatatgatctttcacctatcactgtgaccatcaaggaagaacgccgtagttttctccacttaatcactcgtctttgcgctgtattaggcggtacatttgctttgacaggaatgttagatcgttggatgttccgctttattgaatctttcaacaagaagccgagtactagagcgtaaactagctgaaacagagacaaaacaatgagaaacaaaaaaaaccaaaggaaggaagaagaatctctcaaatcccaaaacttgtatctgccttcttcagacaacaacacccaccagagattccaggattgatgattacattactcagaaactctagaatccatggatatagtttttttttgagtctctcttatgtattactctgattatctctggttaaactagtagagttaatttgtaatttttattcaccttgcttcctgggattttaacatttttgcatct

SEQ ID NO: 33461 - protein, 390 aa, Arabidopsis thaliana
  misc_feature (1)..(390): Ceres Seq. ID no. 13603174
SLSRRSLFLFFSILLLSARASSPPPSNSCPLREAARMGVKQALRSIDAFPRAEDHLLQKTQSGAVVSIVGLLIMATLFLHELSYYLNTLTVHQMSVDLKRGETLPIHVNMTFPSLPCDVLSVDAIDMSGKHEVDLDTNIWKLRLNSHGHIIGTEYISDLVEKGHEHGHSPHKHDGKEEHKNETETEALNILGFDQAAETMIKKVKQALADGEGCRVYGVLDVQRVAGNFHISVHGLNIYVAQMIFGGSKNVNVSHMIHDLSFGPKYPGIHNPLDDTNRILHDTSGTFKYYIKIVPTEYRYLSKDVLSTNQYSVTEYFTPMTEFDRTWPAVYFLYDLSPITVTIKEERRSFLHLITRLCAVLGGTFALTGMLDRWMFRFIESFNKKPSTRA

SEQ ID NO: 33462 - protein, 354 aa, Arabidopsis thaliana
  misc_feature (1)..(354): Ceres Seq. ID no. 13603175
MGVKQALRSIDAFPRAEDHLLQKTQSGAVVSIVGLLIMATLFLHELSYYLNTLTVHQMSVDLKRGETLPIHVNMTFPSLPCDVLSVDAIDMSGKHEVDLDTNIWKLRLNSHGHIIGTEYISDLVEKGHEHGHSPHKHDGKEEHKNETETEALNILGFDQAAETMIKKVKQALADGEGCRVYGVLDVQRVAGNFHISVHGLNIYVAQMIFGGSKNVNVSHMIHDLSFGPKYPGIHNPLDDTNRILHDTSGTFKYYIKIVPTEYRYLSKDVLSTNQYSVTEYFTPMTEFDRTWPAVYFLYDLSPITVTIKEERRSFLHLITRLCAVLGGTFALTGMLDRWMFRFIESFNKKPSTRA

SEQ ID NO: 33463 - protein, 317 aa, Arabidopsis thaliana
  misc_feature (1)..(317): Ceres Seq. ID no. 13603176
MATLFLHELSYYLNTLTVHQMSVDLKRGETLPIHVNMTFPSLPCDVLSVDAIDMSGKHEVDLDTNIWKLRLNSHGHIIGTEYISDLVEKGHEHGHSPHKHDGKEEHKNETETEALNILGFDQAAETMIKKVKQALADGEGCRVYGVLDVQRVAGNFHISVHGLNIYVAQMIFGGSKNVNVSHMIHDLSFGPKYPGIHNPLDDTNRILHDTSGTFKYYIKIVPTEYRYLSKDVLSTNQYSVTEYFTPMTEFDRTWPAVYFLYDLSPITVTIKEERRSFLHLITRLCAVLGGTFALTGMLDRWMFRFIESFNKKPSTRA

SEQ ID NO: 33464 - DNA, 1342 bp, Arabidopsis thaliana
  misc_feature (1)..(1342): Ceres Seq. ID no. 13603177
gtataaagacgacaaagtaaaccaaaaaaaaaaagagttctcctacaattttcctaaattcttggatttgagatttcactttttccgatttgaaacaatgatgataactcgcggtggagccaaggcggcgaaatcgctgttagtggcggctggaccacgtttgttctcgacggtccgtacggtttcgtctcacgaggctttatcagcaagccatattttgaagcctggtgttacatctgcttggatatggactagagctccgacgattggaggtatgagattcgctagcacgatcactctgggagagaaaactccgatgaaggaggaggacgcgaatcagaagaaaacagagaacgaatccaccggtggagacgccgccggaggtaataacaagggagataaaggaatcgcgagctattggggtgttgaacctaataagattactaaagaagatggttctgaatggaagtggaactgtttcaggccatgggaaacgtataaagctgatataacgatagatctgaagaagcatcatgttccaacgacgtttcttgatagaatagcttattggactgttaaatctcttcgttggcctaccgatttgttcttccagaggagatatggatgtcgagctatgatgcttgaaactgtagcagcagtacctggaatggttggaggaatgttactacactgcaaatcgcttcgacgttttgagcaaagtggaggatggattaaggctcttcttgaggaagcagagaatgagagaatgcatcttatgacattcatggaagtcgcgaaaccgaaatggtacgagagagcgctcgtgatcactgtgcaaggagtcttcttcaacgcttatttccttggttacttaatctctcccaagtttgctcatcgtatggttgggtaccttgaagaagaagcgatccattcttatactgagtttctcaaggaacttgacaaaggtaacattgagaatgttcctgctccggctattgctattgattactggaggcttcctgctgatgcgacacttcgtgatgttgtgatggttgttcgtgctgacgaggctcatcaccgtgatgtaaaccattttgcatctgatattcactaccaaggtcgtgaactaaaggaagctccagctccaattgggtatcattgattcgattaaaagaagagctttttctcaagtttaaaactttgttctaaagaatttaagttctttgacttgtatatacatcatcacctctgcttaagccatacttggattcggctttctttgaatgttgctacgaatgttctgatttcttctttacttttcctgtcaatgggcttttgggct

SEQ ID NO: 33465 - protein, 386 aa, Arabidopsis thaliana
  misc_feature (1)..(386): Ceres Seq. ID no. 13603178
YKDDKVNQKKKEFSYNFPKFLDLRFHFFRFETMMITRGGAKAAKSLLVAAGPRLFSTVRTVSSHEALSASHILKPGVTSAWIWTRAPTIGGMRFASTITLGEKTPMKEEDANQKKTENESTGGDAAGGNNKGDKGIASYWGVEPNKITKEDGSEWKWNCFRPWETYKADITIDLKKHHVPTTFLDRIAYWTVKSLRWPTDLFFQRRYGCRAMMLETVAAVPGMVGGMLLHCKSLRRFEQSGGWIKALLEEAENERMHLMTFMEVAKPKWYERALVITVQGVFFNAYFLGYLISPKFAHRMVGYLEEEAIHSYTEFLKELDKGNIENVPAPAIAIDYWRLPADATLRDVVMVVRADEAHHRDVNHFASDIHYQGRELKEAPAPIGYH

SEQ ID NO: 33466 - protein, 354 aa, Arabidopsis thaliana
  misc_feature (1)..(354): Ceres Seq. ID no. 13603179
MMITRGGAKAAKSLLVAAGPRLFSTVRTVSSHEALSASHILKPGVTSAWIWTRAPTIGGMRFASTITLGEKTPMKEEDANQKKTENESTGGDAAGGNNKGDKGIASYWGVEPNKITKEDGSEWKWNCFRPWETYKADITIDLKKHHVPTTFLDRIAYWTVKSLRWPTDLFFQRRYGCRAMMLETVAAVPGMVGGMLLHCKSLRRFEQSGGWIKALLEEAENERMHLMTFMEVAKPKWYERALVITVQGVFFNAYFLGYLISPKFAHRMVGYLEEEAIHSYTEFLKELDKGNIENVPAPAIAIDYWRLPADATLRDVVMVVRADEAHHRDVNHFASDIHYQGRELKEAPAPIGYH

SEQ ID NO: 33467 - protein, 353 aa, Arabidopsis thaliana
  misc_feature (1)..(353): Ceres Seq. ID no. 13603180
MITRGGAKAAKSLLVAAGPRLFSTVRTVSSHEALSASHILKPGVTSAWIWTRAPTIGGMRFASTITLGEKTPMKEEDANQKKTENESTGGDAAGGNNKGDKGIASYWGVEPNKITKEDGSEWKWNCFRPWETYKADITIDLKKHHVPTTFLDRIAYWTVKSLRWPTDLFFQRRYGCRAMMLETVAAVPGMVGGMLLHCKSLRRFEQSGGWIKALLEEAENERMHLMTFMEVAKPKWYERALVITVQGVFFNAYFLGYLISPKFAHRMVGYLEEEAIHSYTEFLKELDKGNIENVPAPAIAIDYWRLPADATLRDVVMVVRADEAHHRDVNHFASDIHYQGRELKEAPAPIGYH

SEQ ID NO: 33468 - DNA, 1030 bp, Arabidopsis thaliana
  misc_feature (1)..(1030): Ceres Seq. ID no. 13603189
agaggggtagtttggtaaattttcaaatgcccttatctcatttccgatcctccttcttcttgctaccgccttcgcacccattcataaaaaaggaaagacgcaatcttttcttgtctcttccattgcttcaaatcctcctaataaagctttcctctttcactttctaatctctttaatccgtttaaatccaatcccaaatacagattttgattacaaaaatctaacattttgctgatttgtgttttagggttctctcgtgttttttatgattttgattcccgtaaagattcaatcacttttctcatatctcttgttactgaatttgatccaatcgatcgataaaccaaacccagaagctatgagagtgcacccaattcccagaaacatcaacaacacattgatccatcatcatcatcataacccgacccgagaacccggaaagaatctccgacgattaccacatatcttcaaccgtgttctggagctaccattgaggtcagaagcagatgtagcagtggaagagagacacgactgttttcgatttgtggcggagacggtaggtctctgtaacggcgatggagaaatgagggcttatatggttgagattcatcctggtataaccaagatcgttgtgaggacaaatgggtcttcttctcttggtttgtctttagacgaattagagcttgacgtgtggcgttttaggttaccggaatcaactaggcctgagcttgttactgttgcttgtgttgatggtgatttgattgttactgtgcctaagaatgctgaagaagaagatgatgatggtggtggtggtgattttggacaaggtattggtagtggaaggcttgtgcttgttcagtgaatcaaagtaatgtcctctatgtaacatgagaagaagactaatctctaatcttcttcgtttcgttgatattgtgtagccttctgtttttgttgttggcaataaaagaaaagattgaatctttgatgatctcttattttgtaagatcaacaagggttgtttaaggttgta

SEQ ID NO: 33469 - protein, 198 aa, Arabidopsis thaliana
  misc_feature (1)..(198): Ceres Seq. ID no. 13603190
MILIPVKIQSLFSYLLLLNLIQSIDKPNPEAMRVHPIPRNINNTLIHHHHHNPTREPGKNLRRLPHIFNRVLELPLRSEADVAVEERHDCFRFVAETVGLCNGDGEMRAYMVEIHPGITKIVVRTNGSSSLGLSLDELELDVWRFRLPESTRPELVTVACVDGDLIVTVPKNAEEEDDDGGGGDFGQGIGSGRLVLVQ

SEQ ID NO: 33470 - protein, 167 aa, Arabidopsis thaliana
  misc_feature (1)..(167): Ceres Seq. ID no. 13603191
MRVHPIPRNINNTLIHHHHHNPTREPGKNLRRLPHIFNRVLELPLRSEADVAVEERHDCFRFVAETVGLCNGDGEMRAYMVEIHPGITKIVVRTNGSSSLGLSLDELELDVWRFRLPESTRPELVTVACVDGDLIVTVPKNAEEEDDDGGGGDFGQGIGSGRLVLVQ

SEQ ID NO: 33471 - DNA, 1525 bp, Arabidopsis thaliana
  misc_feature (1)..(1525): Ceres Seq. ID no. 13603204
aaatctttcgggtcaaaatttccgaaccctaactttagccccaaattagagagagatgcagaaacgggagcttgggaaatccggcggtaattccggtggatcttcgggtccaccagcgaagagaggccgtcccttcggtagtacaagtgctaactcagctgctgctgctgcagcggcggcagcagcggacgcgatgtcaccgtcagctttacttggtccttctcttctagttcacaattccttcgtcgagcagaacaatagaagaatagttcttgcgttgcagagtggtttgaagagtgaggtgacatgggcattgaacacacttacgttgctttccttcaaggaaaaagaagatattcgaagagatgtcatgcctcttgctaagatagctggcttgcttgatgcccttctcttaattatagatgattggcgtgacatagctctcccaaaggacctgacaagaggaactagagttagaactttaggtacaaatgcttcagttacgggatttggcaatgagtatgatgctctagcctctattcaaccccctggatccgggattggttcttctgctgctgaggcattaggaaaaaagagcactggtaaacatcagtcatctcagtggtggatggaagaggatggtttgtttaatctagacgatgaagggagatcagagaaacaaatgtgtgctattgctgcatcgaacgttatccgcaacttctccttcatgcctgataatgaagttgtaatggctcagcatcgccattgcttagaaactgttttccagtgcatacacgatcatatgaccgaggatgaagagctggtcacaaactcgctagagacaattgtaaacctagcgcatttgatggatcttcgaattttcagctcgcttaagcagtcatacatcaacataaatgaaaagaaagctgttcaagctgtggtcggaatcctcaattcttctgtcaaagcttggaattgtgctgctgctgagttgctagggcgtttgataatcaatccggacaatgaacctttcattagtcctttaattccgcagatacacaagcgactaatcgatcttttgagcatacaagccgttgatgcacaagctgcagctgttggagcactctacaatctcgtggaagttaacatggattgcagattaaagctagcaagtgagagatgggcggttgataggttgctgaaagtgataaagactccgcatccggttccagaagtatgtaggaaagctgcaatgatccttgagaaccttgtctcggagcctcaaaacagaggattgctactcgcgtatgagaatgctttcgctgagctgctttttcaagagggtaagtattctgattcatttgctaggattttgtatgaactcactgctagatctaatagcagagttgcttcagctagaggaatctggggcatgtaaaagtcttctctagattagtgggtttgattaattgattgtgttgtaaactttaatcatttgctatgtattaaaaaagcagtgttgttg

SEQ ID NO: 33472 - protein, 460 aa, Arabidopsis thaliana
  misc_feature (1)..(460): Ceres Seq. ID no. 13603205
MQKRELGKSGGNSGGSSGPPAKRGRPFGSTSANSAAAAAAAAAADAMSPSALLGPSLLVHNSFVEQNNRRIVLALQSGLKSEVTWALNTLTLLSFKEKEDIRRDVMPLAKIAGLLDALLLIIDDWRDIALPKDLTRGTRVRTLGTNASVTGFGNEYDALASIQPPGSGIGSSAAEALGKKSTGKHQSSQWWMEEDGLFNLDDEGRSEKQMCAIAASNVIRNFSFMPDNEVVMAQHRHCLETVFQCIHDHMTEDEELVTNSLETIVNLAHLMDLRIFSSLKQSYININEKKAVQAVVGILNSSVKAWNCAAAELLGRLIINPDNEPFISPLIPQIHKRLIDLLSIQAVDAQAAAVGALYNLVEVNMDCRLKLASERWAVDRLLKVIKTPHPVPEVCRKAAMILENLVSEPQNRGLLLAYENAFAELLFQEGKYSDSFARILYELTARSNSRVASARGIWGM

SEQ ID NO: 33473 - protein, 414 aa, Arabidopsis thaliana
  misc_feature (1)..(414): Ceres Seq. ID no. 13603206
MSPSALLGPSLLVHNSFVEQNNRRIVLALQSGLKSEVTWALNTLTLLSFKEKEDIRRDVMPLAKIAGLLDALLLIIDDWRDIALPKDLTRGTRVRTLGTNASVTGFGNEYDALASIQPPGSGIGSSAAEALGKKSTGKHQSSQWWMEEDGLFNLDDEGRSEKQMCAIAASNVIRNFSFMPDNEVVMAQHRHCLETVFQCIHDHMTEDEELVTNSLETIVNLAHLMDLRIFSSLKQSYININEKKAVQAVVGILNSSVKAWNCAAAELLGRLIINPDNEPFISPLIPQIHKRLIDLLSIQAVDAQAAAVGALYNLVEVNMDCRLKLASERWAVDRLLKVIKTPHPVPEVCRKAAMILENLVSEPQNRGLLLAYENAFAELLFQEGKYSDSFARILYELTARSNSRVASARGIWGM

SEQ ID NO: 33474 - protein, 355 aa, Arabidopsis thaliana
  misc_feature (1)..(355): Ceres Seq. ID no. 13603207
MPLAKIAGLLDALLLIIDDWRDIALPKDLTRGTRVRTLGTNASVTGFGNEYDALASIQPPGSGIGSSAAEALGKKSTGKHQSSQWWMEEDGLFNLDDEGRSEKQMCAIAASNVIRNFSFMPDNEVVMAQHRHCLETVFQCIHDHMTEDEELVTNSLETIVNLAHLMDLRIFSSLKQSYININEKKAVQAVVGILNSSVKAWNCAAAELLGRLIINPDNEPFISPLIPQIHKRLIDLLSIQAVDAQAAAVGALYNLVEVNMDCRLKLASERWAVDRLLKVIKTPHPVPEVCRKAAMILENLVSEPQNRGLLLAYENAFAELLFQEGKYSDSFARILYELTARSNSRVASARGIWGM

SEQ ID NO: 33475 - DNA, 1196 bp, Arabidopsis thaliana
  misc_feature (1)..(1196): Ceres Seq. ID no. 13603208
cttcccctcttaccttttcagagagagaaacaatatttctaatctattacaagtaacatgatcggccaacttatgaacctcaaggccacggagctctgtctcggcctccccggcggcgctgaagcagttgagagtcctgccaaatcggcggtgggaagcaagagaggcttctccgaaaccgttgatctcatgctcaatcttcaatctaacaaagaaggctccgttgatctcaaaaacgtttctgctgttcccaaggagaagactacccttaaagatccttctaagcctcctgctaaagcacaagtggtgggatggccacctgtgaggaactacaggaagaacatgatgactcagcagaagaccagtagtggtgcggaggaggccagcagtgagaaggccgggaactttggtggaggagcagccggagccggcttggtgaaggtctccatggacggtgctccatatctgaggaaagttgacctcaagatgtacaaaagctaccaggatctttctgatgcattggccaaaatgttcagctcctttactatgggaaactatggagcacaaggaatgatagatttcatgaacgagagcaagctaatgaatctgctgaatagctctgagtatgtgccaagctacgaggacaaagatggtgactggatgctcgttggcgatgtcccatgggaaatgtttgtcgagtcttgcaaacgtttgcgcattatgaagggatctgaagcagttggacttgctccgagagcaatggagaagtactgcaagaacagatcttgaattaataataaaaaaaaagaagcatcaatgatcaacaatatgacgggttcttgattttatatgtatttttatgattgtatgtggctatcacctatatatgtgtgttgtaattttaaatacttgatgggtatatagggcagtattttaccagtaagatgtggacaaacttgtaatgtgaccaaaagagaggaaacttcaatatctctgtgtttgtgtcatatttattgcccaacatgtgtctgtcggtttgatgatcaatcacaacttgatatgtgcatacatataaatgtgtgtatgtaggtgtgtgtacatgtacatgtgttttgatccctactctgctacttgtcgtttcttgtgtgtgttatctaatagttttttcccaaaatgaataattcgttgttatgttt

SEQ ID NO: 33476 - protein, 243 aa, Arabidopsis thaliana
  misc_feature (1)..(243): Ceres Seq. ID no. 13603209
MIGQLMNLKATELCLGLPGGAEAVESPAKSAVGSKRGFSETVDLMLNLQSNKEGSVDLKNVSAVPKEKTTLKDPSKPPAKAQVVGWPPVRNYRKNMMTQQKTSSGAEEASSEKAGNFGGGAAGAGLVKVSMDGAPYLRKVDLKMYKSYQDLSDALAKMFSSFTMGNYGAQGMIDFMNESKLMNLLNSSEYVPSYEDKDGDWMLVGDVPWEMFVESCKRLRIMKGSEAVGLAPRAMEKYCKNRS

SEQ ID NO: 33477 - protein, 238 aa, Arabidopsis thaliana
  misc_feature (1)..(238): Ceres Seq. ID no. 13603210
MNLKATELCLGLPGGAEAVESPAKSAVGSKRGFSETVDLMLNLQSNKEGSVDLKNVSAVPKEKTTLKDPSKPPAKAQVVGWPPVRNYRKNMMTQQKTSSGAEEASSEKAGNFGGGAAGAGLVKVSMDGAPYLRKVDLKMYKSYQDLSDALAKMFSSFTMGNYGAQGMIDFMNESKLMNLLNSSEYVPSYEDKDGDWMLVGDVPWEMFVESCKRLRIMKGSEAVGLAPRAMEKYCKNRS

SEQ ID NO: 33478 - protein, 199 aa, Arabidopsis thaliana
  misc_feature (1)..(199): Ceres Seq. ID no. 13603211
MLNLQSNKEGSVDLKNVSAVPKEKTTLKDPSKPPAKAQVVGWPPVRNYRKNMMTQQKTSSGAEEASSEKAGNFGGGAAGAGLVKVSMDGAPYLRKVDLKMYKSYQDLSDALAKMFSSFTMGNYGAQGMIDFMNESKLMNLLNSSEYVPSYEDKDGDWMLVGDVPWEMFVESCKRLRIMKGSEAVGLAPRAMEKYCKNRS

SEQ ID NO: 33479 - DNA, 1552 bp, Arabidopsis thaliana
  misc_feature (1)..(1552): Ceres Seq. ID no. 13603212
cttttggatcgcttccgttcaatgtaaccggcgaaacagagcaatctgaaattatcttagggctatagttatggatattttcatggatttcttcaataaaccttctgttacagagacattcgtcgacgttttgctatgtgcagttccgatttgggtcactgttatgatcgggcttctgatcggttggtcttggcgtcctagatggactagcttggtttatttaggtttccgttctaagcttcggtttctatgtactgttcctcctggatttggtgctcgtcgtatttggcttgctttcaccgctctctctgctttttccgtttgttcaacctccaataaatcctcggttaataacggttcctctaaaccggtcgaagaagaagcattttcacgagctagtgataaagttacagagaaagagaaagatgttgtgacagagaaggatttagagcatttgttgcatctgcttgaagctggaaatgctagttttgagtggcaatctatgatggataagtctactccgaatatgagctatcaagcttggcgtcatgagcctgagataggtcctgttgtttatcgtagtcgaactgtttttgaggatgtaacaccagacattgttagggatttcttctgggacgatgagtttcgacctaaatgggatactatgcttgcttacttcaaaactttagaggaagatcctaagacaggaactaccattgttcattggattaaaaagttcccattcttctgtagtgaccgggaatacatcattggtaggagaatatgggaatctggaagaaaatattatgctgtgactaagggagtaccgtataaagctttatcaaagcgtgataagccgaggcgagtcgaactttatttctcaagttggattatcaatgcagttgaatcaagaaaaggtgatgggcaaatgacagcttgtgaagtctctcttgttcactacgaagacatgggaatcccaaaagatgtagcaaagttaggagtccgtcatggcatgtggggagctgtaaagaagctaaactctggcttaagggcgtaccaaagcgctagaaaacctgggacgtcgctctcacggagtgcgcagatggcaagtatcaccacaaagctgaacatggatttggtggaaacatctggggcagaggacgaagagagaggacgagcagtagagaatgcgaggaaacaaaatgatcagttcggtgtagactggaaatggatcgttgtaggaggagtagctttggcttgtgggcttcattctagtgctataggtaaggcgttaatggttggagctggacagagacttgctcgtaggtgagatcttttgcctgagagtttcattatcttatctgtttccctggagaattcttagaccaacacagaaacactatattactgatatggattgtgttttcttgtaactgcactgaaatgagcatagtggtttcgaaagcaaaccatgcagagtagttttgaagcaagggcaaacatttggtcgaatatttcttgtaatacggtttaagattctggagacggtttt

SEQ ID NO: 33480 - protein, 419 aa, Arabidopsis thaliana
  misc_feature (1)..(419): Ceres Seq. ID no. 13603213
MDIFMDFFNKPSVTETFVDVLLCAVPIWVTVMIGLLIGWSWRPRWTSLVYLGFRSKLRFLCTVPPGFGARRIWLAFTALSAFSVCSTSNKSSVNNGSSKPVEEEAFSRASDKVTEKEKDVVTEKDLEHLLHLLEAGNASFEWQSMMDKSTPNMSYQAWRHEPEIGPVVYRSRTVFEDVTPDIVRDFFWDDEFRPKWDTMLAYFKTLEEDPKTGTTIVHWIKKFPFFCSDREYIIGRRIWESGRKYYAVTKGVPYKALSKRDKPRRVELYFSSWIINAVESRKGDGQMTACEVSLVHYEDMGIPKDVAKLGVRHGMWGAVKKLNSGLRAYQSARKPGTSLSRSAQMASITTKLNMDLVETSGAEDEERGRAVENARKQNDQFGVDWKWIVVGGVALACGLHSSAIGKALMVGAGQRLARR

SEQ ID NO: 33481 - protein, 415 aa, Arabidopsis thaliana
  misc_feature (1)..(415): Ceres Seq. ID no. 13603214
MDFFNKPSVTETFVDVLLCAVPIWVTVMIGLLIGWSWRPRWTSLVYLGFRSKLRFLCTVPPGFGARRIWLAFTALSAFSVCSTSNKSSVNNGSSKPVEEEAFSRASDKVTEKEKDVVTEKDLEHLLHLLEAGNASFEWQSMMDKSTPNMSYQAWRHEPEIGPVVYRSRTVFEDVTPDIVRDFFWDDEFRPKWDTMLAYFKTLEEDPKTGTTIVHWIKKFPFFCSDREYIIGRRIWESGRKYYAVTKGVPYKALSKRDKPRRVELYFSSWIINAVESRKGDGQMTACEVSLVHYEDMGIPKDVAKLGVRHGMWGAVKKLNSGLRAYQSARKPGTSLSRSAQMASITTKLNMDLVETSGAEDEERGRAVENARKQNDQFGVDWKWIVVGGVALACGLHSSAIGKALMVGAGQRLARR

SEQ ID NO: 33482 - protein, 388 aa, Arabidopsis thaliana
  misc_feature (1)..(388): Ceres Seq. ID no. 13603215
MIGLLIGWSWRPRWTSLVYLGFRSKLRFLCTVPPGFGARRIWLAFTALSAFSVCSTSNKSSVNNGSSKPVEEEAFSRASDKVTEKEKDVVTEKDLEHLLHLLEAGNASFEWQSMMDKSTPNMSYQAWRHEPEIGPVVYRSRTVFEDVTPDIVRDFFWDDEFRPKWDTMLAYFKTLEEDPKTGTTIVHWIKKFPFFCSDREYIIGRRIWESGRKYYAVTKGVPYKALSKRDKPRRVELYFSSWIINAVESRKGDGQMTACEVSLVHYEDMGIPKDVAKLGVRHGMWGAVKKLNSGLRAYQSARKPGTSLSRSAQMASITTKLNMDLVETSGAEDEERGRAVENARKQNDQFGVDWKWIVVGGVALACGLHSSAIGKALMVGAGQRLARR

SEQ ID NO: 33483 - DNA, 1332 bp, Arabidopsis thaliana
  misc_feature (1)..(1332): Ceres Seq. ID no. 13603224
ctacacaacacagctttttaaacccaacagagcaaaaaagcaaaagattcaacaaaaatctcctcaaattctattcatggtctctagaaattctgacggatatttcttggatccgaccggtatgactgttcctggtctcggaccttcctttacagccgccgtttcttcttcttcttcaccaacgacttcttctacggccgtggctgtggcggatgtgacggcgatggtttcttcttcggaggaggatttgagtaagaagattaggaagccttatactattactaagtctagagagagctggacggagcctgagcatgataaattccttgaagctcttcaattgtttgatagagactggaagaagattgaagcttttattggttcaaagacagtgattcagatacgaagtcatgctcagaagtattttcttaaggtacaaaagagtgggaccggtgaacatctccctcctcctcgacctaaaaggaaagccgctcatccatatcctcagaaggctcacaagaatgtgcaactgcaagtaccagggtcattcaagtcaacatctgaaccaaatgacccaagttttatgtttaggcctgagtcttcttcaatgctgatgacttcgccaaccactgctgctgcggctccatggacaaataatgcgcaaacaattagcttcactcccctcccaaaaggagcaggagctaataacaattgttctagtagttctgaaaatactccaagaccacgatccaacagggacgcaagagaccatggaaatgttggccattcattaagagttttaccggactttgcccaagtatacggcttcattggaagtgtgtttgacccatatgcaagtaatcatctacaaaagctgaagaagatggaccccatagatgttgaaacagtgttactattgatgagaaatctatccatcaacttgtctagtcctgactttgaggatcatagacggcttctttcgtcttatgatatcggatctgagacagcaactgatcatggtggagtgaataaaaccttaaacaaagacccacctgaaatctctacttaatgtttaatagaagaggagaactgtgaaaagtgtctcaggtgagccagccaacaaccagatggctacaaaatacagagattctgttgtggttttttgtttgtacataggaagaagatgaagctgatgttactcggtttagttgttgttactgttataaatagtctgttgggttaaggatggtatatgtacagtgtattatcataagttagatctcaagtttaaacatatgtatcagtctctttgatgggagaccaaaatctctt

SEQ ID NO: 33484 - protein, 355 aa, Arabidopsis thaliana
  misc_feature (1)..(355): Ceres Seq. ID no. 13603225
YTTQLFKPNRAKKQKIQQKSPQILFMVSRNSDGYFLDPTGMTVPGLGPSFTAAVSSSSSPTTSSTAVAVADVTAMVSSSEEDLSKKIRKPYTITKSRESWTEPEHDKFLEALQLFDRDWKKIEAFIGSKTVIQIRSHAQKYFLKVQKSGTGEHLPPPRPKRKAAHPYPQKAHKNVQLQVPGSFKSTSEPNDPSFMFRPESSSMLMTSPTTAAAAPWTNNAQTISFTPLPKGAGANNNCSSSSENTPRPRSNRDARDHGNVGHSLRVLPDFAQVYGFIGSVFDPYASNHLQKLKKMDPIDVETVLLLMRNLSINLSSPDFEDHRRLLSSYDIGSETATDHGGVNKTLNKDPPEIST

SEQ ID NO: 33485 - protein, 330 aa, Arabidopsis thaliana
  misc_feature (1)..(330): Ceres Seq. ID no. 13603226
MVSRNSDGYFLDPTGMTVPGLGPSFTAAVSSSSSPTTSSTAVAVADVTAMVSSSEEDLSKKIRKPYTITKSRESWTEPEHDKFLEALQLFDRDWKKIEAFIGSKTVIQIRSHAQKYFLKVQKSGTGEHLPPPRPKRKAAHPYPQKAHKNVQLQVPGSFKSTSEPNDPSFMFRPESSSMLMTSPTTAAAAPWTNNAQTISFTPLPKGAGANNNCSSSSENTPRPRSNRDARDHGNVGHSLRVLPDFAQVYGFIGSVFDPYASNHLQKLKKMDPIDVETVLLLMRNLSINLSSPDFEDHRRLLSSYDIGSETATDHGGVNKTLNKDPPEIST

SEQ ID NO: 33486 - protein, 315 aa, Arabidopsis thaliana
  misc_feature (1)..(315): Ceres Seq. ID no. 13603227
MTVPGLGPSFTAAVSSSSSPTTSSTAVAVADVTAMVSSSEEDLSKKIRKPYTITKSRESWTEPEHDKFLEALQLFDRDWKKIEAFIGSKTVIQIRSHAQKYFLKVQKSGTGEHLPPPRPKRKAAHPYPQKAHKNVQLQVPGSFKSTSEPNDPSFMFRPESSSMLMTSPTTAAAAPWTNNAQTISFTPLPKGAGANNNCSSSSENTPRPRSNRDARDHGNVGHSLRVLPDFAQVYGFIGSVFDPYASNHLQKLKKMDPIDVETVLLLMRNLSINLSSPDFEDHRRLLSSYDIGSETATDHGGVNKTLNKDPPEIST

SEQ ID NO: 33487 - DNA, 889 bp, Arabidopsis thaliana
  misc_feature (1)..(889): Ceres Seq. ID no. 13603235
aacgaagagtcatggcgatgctttttcgacctcctccttcacaatgtagaagcttctctccttttgtcttcaactacagctccagagaagtttcttcgtcgtctcgtctctccttgaaaacctccggcgacgaagaaaactgggtttcacgtttccggtcgaaatctctcagtttggtgttctctggagctcttgctctcggtttatctctatcaggcgtggggtttgcagatgcaaaagttggtgttaacaaaccagaattgcttcctaaagagttcacttctgttatagatgttgctgatttcctctctaatggtcaggagaagagaattgctcaagaaatcgctaatcttgagaaagatacaggattcaagttgagagtcttggctcaaaactatcccgttacccctggactagcaatcaaagatttctggcaggtggatgatagcacaattgtgtttgtcgctgacccgacttttgggaacatattgaatttcaatgttggagctacggttgatttagacatacctcgtagtttctggagtcgactggctgggaaatacggcaatatgttttactggaaagagaagggagaagatgcatctattgaagctgcagtgatggcgatatcaagttgcttacgagaaccagttggtcgaaacaactgtgcagagatccaatgaagtatatgaccccatcaagcgtatatgttattatcataatatcattgtatagattggcaccaaagagatacagaatttgtaagaatgaatccacgtctagtagtaacctctctccatttctcagcttcacctactcaaacaaacagtttcaattggttacttgtatcttttaaaacaaacaaatagagaaaccaaaatcaataaac

SEQ ID NO: 33488 - protein, 226 aa, Arabidopsis thaliana
  misc_feature (1)..(226): Ceres Seq. ID no. 13603236
RRVMAMLFRPPPSQCRSFSPFVFNYSSREVSSSSRLSLKTSGDEENWVSRFRSKSLSLVFSGALALGLSLSGVGFADAKVGVNKPELLPKEFTSVIDVADFLSNGQEKRIAQEIANLEKDTGFKLRVLAQNYPVTPGLAIKDFWQVDDSTIVFVADPTFGNILNFNVGATVDLDIPRSFWSRLAGKYGNMFYWKEKGEDASIEAAVMAISSCLREPVGRNNCAEIQ

SEQ ID NO: 33489 - protein, 223 aa, Arabidopsis thaliana
  misc_feature (1)..(223): Ceres Seq. ID no. 13603237
MAMLFRPPPSQCRSFSPFVFNYSSREVSSSSRLSLKTSGDEENWVSRFRSKSLSLVFSGALALGLSLSGVGFADAKVGVNKPELLPKEFTSVIDVADFLSNGQEKRIAQEIANLEKDTGFKLRVLAQNYPVTPGLAIKDFWQVDDSTIVFVADPTFGNILNFNVGATVDLDIPRSFWSRLAGKYGNMFYWKEKGEDASIEAAVMAISSCLREPVGRNNCAEIQ

SEQ ID NO: 33490 - protein, 221 aa, Arabidopsis thaliana
  misc_feature (1)..(221): Ceres Seq. ID no. 13603238
MLFRPPPSQCRSFSPFVFNYSSREVSSSSRLSLKTSGDEENWVSRFRSKSLSLVFSGALALGLSLSGVGFADAKVGVNKPELLPKEFTSVIDVADFLSNGQEKRIAQEIANLEKDTGFKLRVLAQNYPVTPGLAIKDFWQVDDSTIVFVADPTFGNILNFNVGATVDLDIPRSFWSRLAGKYGNMFYWKEKGEDASIEAAVMAISSCLREPVGRNNCAEIQ

SEQ ID NO: 33491 - DNA, 1146 bp, Arabidopsis thaliana
  misc_feature (1)..(1146): Ceres Seq. ID no. 13603263
acaattaaagtgagaattttcctgaagaagaagaacttttgctttttttctgggtttgcttttttgttgtgtcaatgaaatgggagaaatggagatcgaagaaatcgaagctgttcttgagaaaatctgggatctacatgacaagcttagcgatgagattcacttgatttcgaagtctcactttctcaaatcggttaaaccttcaaatagatcggagaagagaaagaatcctcacggaaattccggcgaagataagcgacctggttatgttttcatcaaaggattcgccgtcgatgataacgactccacgattcaggaggcgaagagtcttaacgcaattcgaaccgctcttgagaaccttgaagaccagctcgagtttttccatactatacatacacagcagcgaacagagaaagatgttgcgattgctcggcttgaacagagcaggatattactagcaatgagattagctgaacaccacggcaagaactatggagtcctagaggaagctcttgcatttgttgggagcattaaatccaactcgcattacgtttcacctgatcacctctacgattcctctcgaaacccagacggagcaaactctattccagatggaatagagtcaaactttgtaatcaacgcctttgcctcgactttcgggtttgccaagagagcacttggattcaaccatgtgaaaggcgtacttggaaacgctgctatatttgccataagcgtggtcgctatgctacatcttcaccaagtggctactagtgaacatcatctgcagaagaaagaagacagattctacagaagccaacaaaggaaaacatacggaagagataagtcttcagctgacagaagtttggatcacttggacgtaatgatggctcgtggttaagaccagagatcgaacttgtctacacgtgagaaaactaaagaagagaagagataattgttgctctcataggtttcgatattatcagcaaaaggataagaatttggaggcaaagtgttggaattttctgagctcgtctgatgcaaatattgttcctttcttctaattttgattttcaaacactgtggttaatgttttgtttgttttgtttggttttgttgatttcaaatgtggttaggctttcttgtaaa

SEQ ID NO: 33492 - protein, 272 aa, Arabidopsis thaliana
  misc_feature (1)..(272): Ceres Seq. ID no. 13603264
MGEMEIEEIEAVLEKIWDLHDKLSDEIHLISKSHFLKSVKPSNRSEKRKNPHGNSGEDKRPGYVFIKGFAVDDNDSTIQEAKSLNAIRTALENLEDQLEFFHTIHTQQRTEKDVAIARLEQSRILLAMRLAEHHGKNYGVLEEALAFVGSIKSNSHYVSPDHLYDSSRNPDGANSIPDGIESNFVINAFASTFGFAKRALGFNHVKGVLGNAAIFAISVVAMLHLHQVATSEHHLQKKEDRFYRSQQRKTYGRDKSSADRSLDHLDVMMARG

SEQ ID NO: 33493 - protein, 269 aa, Arabidopsis thaliana
  misc_feature (1)..(269): Ceres Seq. ID no. 13603265
MEIEEIEAVLEKIWDLHDKLSDEIHLISKSHFLKSVKPSNRSEKRKNPHGNSGEDKRPGYVFIKGFAVDDNDSTIQEAKSLNAIRTALENLEDQLEFFHTIHTQQRTEKDVAIARLEQSRILLAMRLAEHHGKNYGVLEEALAFVGSIKSNSHYVSPDHLYDSSRNPDGANSIPDGIESNFVINAFASTFGFAKRALGFNHVKGVLGNAAIFAISVVAMLHLHQVATSEHHLQKKEDRFYRSQQRKTYGRDKSSADRSLDHLDVMMARG

SEQ ID NO: 33494 - protein, 145 aa, Arabidopsis thaliana
  misc_feature (1)..(145): Ceres Seq. ID no. 13603266
MRLAEHHGKNYGVLEEALAFVGSIKSNSHYVSPDHLYDSSRNPDGANSIPDGIESNFVINAFASTFGFAKRALGFNHVKGVLGNAAIFAISVVAMLHLHQVATSEHHLQKKEDRFYRSQQRKTYGRDKSSADRSLDHLDVMMARG

SEQ ID NO: 33495 - DNA, 1600 bp, Arabidopsis thaliana
  misc_feature (1)..(1600): Ceres Seq. ID no. 13603271
atcagagagactaggtttggtaattgatcagaaagtaattaagaagatcacacaaaattgacatcccaaaaactaatccgataaaaatcataaatctcaacggcactctcttctcttgtctctccttatttctcaatccagattccaatttttctcagcgaagtgagtgatctcgccgtttgtgttccgctggtgaatcatcaccggagaattgcagatccaatgatacattcctaatcggttttattttgagtgacgacgaatcattggatccagaaaatccgatttctggagatttgaattagtgaaatttgatcgaatttcgacagtgaagaggcatttgcgtctgattgctttgactaagagatctgattttggatctatttcaatggcgaggaaagggtcgagtataagattatcgagctcgagaatatcaacccttttgctctttatgtttgcaacttttgcttccttctatgtagcaggccgtttatggcaagaatctcaaactagggttcatctaatcaatgagctcgatagagtaaccggacaggggaaatctgctatatcagtggatgatactttgaagatcatagcttgcagggaacagaagaagacactagcagctcttgagatggaattaagttcagctaggcaagaaggctttgtttcaaaaagtcccaaacttgctgatggaactgaaaccaagaaaagaccgttagtggttatcgggataatgacaagtttgggtaacaagaagaagagggatgcagttcgtcaagcatggatggggactggtgcatcacttaaaaaacttgaaagtgaaaagggtgtgattgcaagatttgttattggaagaagtgcaaataaaggggacagcatggacaagagcattgatactgaaaatagtcaaaccgatgacttcattattctcgatgatgtagttgaggcacccgaggaagcttctaagaaggtaaaactgttctttgcctacgctgcagataggtgggatgcacagttttatgcaaaagccatcgacaatatctacgtaaatatagatgctctgggaactacgcttgcagcacatctggaaaacccacgggcttacatcggttgcatgaaatcaggcgaagtcttctcagaaccgaaccacaaatggtatgaaccagagtggtggaaattcggtgacaagaaagcatacttccggcatgcttatggggagatgtatgttataacgcacgcattggctagatttgtatcgatcaatagagacattcttcattcgtatgctcatgatgacgtcagcacgggttcatggtttgtgggtcttgatgttaagcatgtagatgaaggaaagttttgctgttctgcgtggtcctcagaagccatatgcgcaggagtgtagtagaaccaaagacgaatccaaagtgtgaggctcttggctctttggtgcttatagagaaagaagaacaaatgacatttgtctgaacttgccattttattggcattgcattatacgaagtctaggatttggatgtgggaatagatattcttaccgacaaacgttaaactccaaaaaaaataatcattcatttacagc

SEQ ID NO: 33496 - protein, 338 aa, Arabidopsis thaliana
  misc_feature (1)..(338): Ceres Seq. ID no. 13603272
MARKGSSIRLSSSRISTLLLFMFATFASFYVAGRLWQESQTRVHLINELDRVTGQGKSAISVDDTLKIIACREQKKTLAALEMELSSARQEGFVSKSPKLADGTETKKRPLVVIGIMTSLGNKKKRDAVRQAWMGTGASLKKLESEKGVIARFVIGRSANKGDSMDKSIDTENSQTDDFIILDDVVEAPEEASKKVKLFFAYAADRWDAQFYAKAIDNIYVNIDALGTTLAAHLENPRAYIGCMKSGEVFSEPNHKWYEPEWWKFGDKKAYFRHAYGEMYVITHALARFVSINRDILHSYAHDDVSTGSWFVGLDVKHVDEGKFCCSAWSSEAICAGV

SEQ ID NO: 33497 - protein, 317 aa, Arabidopsis thaliana
  misc_feature (1)..(317): Ceres Seq. ID no. 13603273
MFATFASFYVAGRLWQESQTRVHLINELDRVTGQGKSAISVDDTLKIIACREQKKTLAALEMELSSARQEGFVSKSPKLADGTETKKRPLVVIGIMTSLGNKKKRDAVRQAWMGTGASLKKLESEKGVIARFVIGRSANKGDSMDKSIDTENSQTDDFIILDDVVEAPEEASKKVKLFFAYAADRWDAQFYAKAIDNIYVNIDALGTTLAAHLENPRAYIGCMKSGEVFSEPNHKWYEPEWWKFGDKKAYFRHAYGEMYVITHALARFVSINRDILHSYAHDDVSTGSWFVGLDVKHVDEGKFCCSAWSSEAICAGV

SEQ ID NO: 33498 - protein, 256 aa, Arabidopsis thaliana
  misc_feature (1)..(256): Ceres Seq. ID no. 13603274
MELSSARQEGFVSKSPKLADGTETKKRPLVVIGIMTSLGNKKKRDAVRQAWMGTGASLKKLESEKGVIARFVIGRSANKGDSMDKSIDTENSQTDDFIILDDVVEAPEEASKKVKLFFAYAADRWDAQFYAKAIDNIYVNIDALGTTLAAHLENPRAYIGCMKSGEVFSEPNHKWYEPEWWKFGDKKAYFRHAYGEMYVITHALARFVSINRDILHSYAHDDVSTGSWFVGLDVKHVDEGKFCCSAWSSEAICAGV

SEQ ID NO: 33499 - DNA, 1663 bp, Arabidopsis thaliana
  misc_feature (1)..(1663): Ceres Seq. ID no. 13603279
atgggtgaagacaagaagacggcaagggagacggtggaggaggaaccacttagcccatgttcacggctgttcaattcgccggattttaactgtgcaataatcgttacaatgggatctaaagttaaaggagacacaccagccatcatccacggccttgaacacaccctcgtaaaccaccctcgcttctctagcattttagagatgaacaatgggaagaagccgcgttgggttcggacaaaagttaaagtagaagagcatgtgattgttcctgatgtggatcccgacattgaaaatccggatcagtatcttgaagactatatctctaagttaacgaccattcctatggatttgtctaaaccattatgggaaatgcacttactaggcgtcaaaacatcgaacgctgaatcctatgctattctcaagatccatcattctttgggtgatggaatgtctctcatgtctcttttactggcttgtacccgcaaaacatcagaccccgaggctttgcctaccgttgcggttcataaaaaacgctttggaccgagctgcaacagcgggtttttcaacaagatttggtggttatttgtagggctctggttcatcctaagattgctattcaacacttttgttgatatcttaatgtttgctcttacaatatttgtcttgagggatacggagactcctctcttggccaaacccggtagtgaacttatccctaagaggttcgtccaccggattatcagttttgacgatgttaagctggtgaaaaacgcaatgaaaatgacggtgaacgatgttcttcttggagtaacgcaagccggactttcgcgttaccttagtcgaaaatatgatcaagaagcaacaccgaaatcgaaagagtccatgaggagaatccgacttcgttcagccattatgattaacttgagaccaaacgcaggaattgaggctctagcggatatgatggccaagaaatcaaaatgcagatggggaaatctcttcggctacattctcctaccgttctccgttgggctagagaccgatcctctagaatacgtgcgccaagctaaagccacgattgaccgcaagaaacactctctagaagccgtattctccatggcattctttaaattgatactaaaagttcttgggctcaaggcaagtgtagttcttgtaaggaaagtgatccatagcacaacgttatcattttcaaatgtggtcggtccaaaggaagaaattacattccatggtcacccactgaattatatctccccatgtgtttttggccacccacatgctcttactctacatttccagacctacgcgaacaaggtcataatatcggtaacggctgatccaacggtcattcctgaccctcacaagatgtgtgatgatttggtggagtctctcaagatgattaaagccgctgttcttgaaagagggttatatgagattgaggtctaactaaagctcttttgttgtggatcacaatgtggattcgcccgtttcttctttgtctacggctcctcaatgattactctaaattgataccttaggaagttattattataataactagacatattgatataaaaaagttgtaagacatcaagttaaaattttaagcatgtagtgtatcattttaatagatactaattcacttccg

SEQ ID NO: 33500 - protein, 486 aa, Arabidopsis thaliana
  misc_feature (1)..(486): Ceres Seq. ID no. 13603280
MGEDKKTARETVEEEPLSPCSRLFNSPDFNCAIIVTMGSKVKGDTPAIIHGLEHTLVNHPRFSSILEMNNGKKPRWVRTKVKVEEHVIVPDVDPDIENPDQYLEDYISKLTTIPMDLSKPLWEMHLLGVKTSNAESYAILKIHHSLGDGMSLMSLLLACTRKTSDPEALPTVAVHKKRFGPSCNSGFFNKIWWLFVGLWFILRLLFNTFVDILMFALTIFVLRDTETPLLAKPGSELIPKRFVHRIISFDDVKLVKNAMKMTVNDVLLGVTQAGLSRYLSRKYDQEATPKSKESMRRIRLRSAIMINLRPNAGIEALADMMAKKSKCRWGNLFGYILLPFSVGLETDPLEYVRQAKATIDRKKHSLEAVFSMAFFKLILKVLGLKASVVLVRKVIHSTTLSFSNVVGPKEEITFHGHPLNYISPCVFGHPHALTLHFQTYANKVIISVTADPTVIPDPHKMCDDLVESLKMIKAAVLERGLYEIEV

SEQ ID NO: 33501 - protein, 450 aa, Arabidopsis thaliana
  misc_feature (1)..(450): Ceres Seq. ID no. 13603281
MGSKVKGDTPAIIHGLEHTLVNHPRFSSILEMNNGKKPRWVRTKVKVEEHVIVPDVDPDIENPDQYLEDYISKLTTIPMDLSKPLWEMHLLGVKTSNAESYAILKIHHSLGDGMSLMSLLLACTRKTSDPEALPTVAVHKKRFGPSCNSGFFNKIWWLFVGLWFILRLLFNTFVDILMFALTIFVLRDTETPLLAKPGSELIPKRFVHRIISFDDVKLVKNAMKMTVNDVLLGVTQAGLSRYLSRKYDQEATPKSKESMRRIRLRSAIMINLRPNAGIEALADMMAKKSKCRWGNLFGYILLPFSVGLETDPLEYVRQAKATIDRKKHSLEAVFSMAFFKLILKVLGLKASVVLVRKVIHSTTLSFSNVVGPKEEITFHGHPLNYISPCVFGHPHALTLHFQTYANKVIISVTADPTVIPDPHKMCDDLVESLKMIKAAVLERGLYEIEV

SEQ ID NO: 33502 - protein, 419 aa, Arabidopsis thaliana; identical to SEQ ID NO: 30251
  misc_feature (1)..(419): Ceres Seq. ID no. 13603282

SEQ ID NO: 33503 - DNA, 1225 bp, Arabidopsis thaliana
  misc_feature (1)..(1225): Ceres Seq. ID no. 13603283
aatttccctatcaaagtgaatgactttcttctccaaaatcgatttctgaaacatcccatttcttgatttccctctttgtcgcaaacccaacaaagtagagcaaaaccctaaaacggaaaccttccatggcgattatctctgaggtagaagaagaaagcagtagcagccgacccatgatatttccctttagggcaacactcagttctgcaaacccattagggtttttggagaaagttttcgactttctcggagaacagagcgattttctcaagaaaccctccgcggaggacgagatcgtcgtcgcggttagggcggcgaaggagaagttgaaaaaggctgagaagaagaaagctgagaaggagagtgtgaagcctgtggagaagaaagccgagaaggaaattgttaagcttgtggagaagaaggtagagaaggagagtgtcaagccaactatagctgcttcaagtgctgagcctatagaagtggagaagcctaaggaggaagaggagaagaaggaatctggtcccattgttcctaacaaaggtaatggaactgatcttgagaactactcatggatccagaatctccaggaggttacagttaacattccagtgcctactgggactaaagcacggactgttgtatgtgagattaagaaaaaccgtctcaaggttggtctcaaaggccaggatccaatcgtcgatggggagctctaccgatctgtgaagcctgatgactgctactggaatatcgaggatcaaaaggtgatttcgattctcttgactaagtctgatcagatggagtggtggaaatgctgtgtgaaaggtgaacctgaaatcgatactcagaaagttgaaccagagactagtaaattaggtgaccttgatccagaaactcgctcgactgttgagaaaatgatgtttgatcaaaggcaaaagcagatgggtcttccaacaagcgaggagctacagaagcaagagatccttaagaaattcatgtctgagcatccggagatggacttctcaaatgcaaagtttaactgatgctcgtatcgtccagtctctctgccaaaaaagaaaaaccagtttttgcatcttcaccagtttttaaaagcttgttacttttgtttagtttctcatttctgaatacatagttcggtttatgtccctagctttatgattctctggtttttattgaaactttttctgaaaaaaaaaactgttttctc

SEQ ID NO: 33504 - protein, 304 aa, Arabidopsis thaliana
  misc_feature (1)..(304): Ceres Seq. ID no. 13603284
MAIISEVEEESSSSRPMIFPFRATLSSANPLGFLEKVFDFLGEQSDFLKKPSAEDEIVVAVRAAKEKLKKAEKKKAEKESVKPVEKKAEKEIVKLVEKKVEKESVKPTIAASSAEPIEVEKPKEEEEKKESGPIVPNKGNGTDLENYSWIQNLQEVTVNIPVPTGTKARTVVCEIKKNRLKVGLKGQDPIVDGELYRSVKPDDCYWNIEDQKVISILLTKSDQMEWWKCCVKGEPEIDTQKVEPETSKLGDLDPETRSTVEKMMFDQRQKQMGLPTSEELQKQEILKKFMSEHPEMDFSNAKFN

SEQ ID NO: 33505 - protein, 288 aa, Arabidopsis thaliana
  misc_feature (1)..(288): Ceres Seq. ID no. 13603285
MIFPFRATLSSANPLGFLEKVFDFLGEQSDFLKKPSAEDEIVVAVRAAKEKLKKAEKKKAEKESVKPVEKKAEKEIVKLVEKKVEKESVKPTIAASSAEPIEVEKPKEEEEKKESGPIVPNKGNGTDLENYSWIQNLQEVTVNIPVPTGTKARTVVCEIKKNRLKVGLKGQDPIVDGELYRSVKPDDCYWNIEDQKVISILLTKSDQMEWWKCCVKGEPEIDTQKVEPETSKLGDLDPETRSTVEKMMFDQRQKQMGLPTSEELQKQEILKKFMSEHPEMDFSNAKFN

SEQ ID NO: 33506 - DNA, 1743 bp, Arabidopsis thaliana
  misc_feature (1)..(1743): Ceres Seq. ID no. 13603290
agagaagaaatagagagagaggccacaaggcacacacaagtcagtatcccacgtgcatctgggaactcgacccctctcctctgccacaacccactcttcatttctctctttctccaccaatctctctttctctctctcaaaagaagagaaactaataattctcaaaagctcacacacagaaacagaggaatctataaggaagttttggtttttggttatcaacaatggtggaagcaaaagatcaagatatgggtgatggtatgcaatgtataaaccatccatttactaaaaacccaggtgggatctgtgctttttgtcttcaagaaaagcttggaaagcttgtaacttcatctttcccacttcctaaacacctcacttcctcttcaacttcttcttctccttccttcagatctgactctgttggtagcacaaccactgcctctgccgcaaatctctcagcgtctctttctctctctgtctccggagcaacaaacaacaacaacagcaagcttccgtttttgttagctaagaagaagaagaagatgcttactgcttcttcttcttcttcgaccacggctaatattgtctacaagagaagtcaatctacaaggactacgaagacaacgtacggagattcagatttgagcccgagaaagagaaatgggttttggtccttttttcatctctactcttcgaaacaacatggtagcagtaagaaagttggaaactttcatcaacccataagccagactgagacaaaaacagagttggcagagactacaacagtgggatcttcgtcttcttcgtcagcttcttcttcaatgtcaaagagagttgttggtggtggtgggagtagtagtaacagaaacggtattgatgtgattgttgaagaagatggaagtcctaacattgaagtcacaccaagtgagaggaaagtgtcgagatctagatctgttgggtgtggaagtagaagcttctctggtgatttctttgagaggatcacaaatgggtttggagattgtactttgagaagagttgagtcacagagagaaggtaataataacaaaggtaacaaggtcagtagtaaccctagtaatggtgttagagagatggtgagatgtggtgggatctttggtgggtttatgataatgacgtcatcgtcttcttcttcatcttcatcatcatgggtatcatcatcatcagctgaacatcatcatcatcataatcataacatgggtcatggtggtggaggaaggaacagaagctggggatggtcatttgcaagtccaatgagagcttttacttcttcttcttactctggtaaaagaggccgtacaatttcagattctactacaagcaagaacacaactccaaacttgggtgcaattccttctttgttgtctgtcagaagctgaattaataataaactttgatctatgtgtttctaataagttcttaaacgagaaaatacatttaattagtttttatcattttcatcaatgtgtttatcttttttttaggtgttcttcaaatatttgttgatgctctttttgataatcttattagtattgtaatgtcacaccactcttctatgttcattatcatcttttgtcaaacaaggaacttaggatactttgagctactttttctgtttatttgtctttttctcttttgtttattttgatctttggattgattcctatgtctctttgaatgatctaatggtaaataaattggttttat

SEQ ID NO: 33507 - protein, 396 aa, Arabidopsis thaliana
  misc_feature (1)..(396): Ceres Seq. ID no. 13603291
MVEAKDQDMGDGMQCINHPFTKNPGGICAFCLQEKLGKLVTSSFPLPKHLTSSSTSSSPSFRSDSVGSTTTASAANLSASLSLSVSGATNNNNSKLPFLLAKKKKKMLTASSSSSTTANIVYKRSQSTRTTKTTYGDSDLSPRKRNGFWSFFHLYSSKQHGSSKKVGNFHQPISQTETKTELAETTTVGSSSSSSASSSMSKRVVGGGGSSSNRNGIDVIVEEDGSPNIEVTPSERKVSRSRSVGCGSRSFSGDFFERITNGFGDCTLRRVESQREGNNNKGNKVSSNPSNGVREMVRCGGIFGGFMIMTSSSSSSSSSSWVSSSSAEHHHHHNHNMGHGGGGRNRSWGWSFASPMRAFTSSSYSGKRGRTISDSTTSKNTTPNLGAIPSLLSVRS

SEQ ID NO: 33508 - protein, 388 aa, Arabidopsis thaliana
  misc_feature (1)..(388): Ceres Seq. ID no. 13603292
MGDGMQCINHPFTKNPGGICAFCLQEKLGKLVTSSFPLPKHLTSSSTSSSPSFRSDSVGSTTTASAANLSASLSLSVSGATNNNNSKLPFLLAKKKKKMLTASSSSSTTANIVYKRSQSTRTTKTTYGDSDLSPRKRNGFWSFFHLYSSKQHGSSKKVGNFHQPISQTETKTELAETTTVGSSSSSSASSSMSKRVVGGGGSSSNRNGIDVIVEEDGSPNIEVTPSERKVSRSRSVGCGSRSFSGDFFERITNGFGDCTLRRVESQREGNNNKGNKVSSNPSNGVREMVRCGGIFGGFMIMTSSSSSSSSSSWVSSSSAEHHHHHNHNMGHGGGGRNRSWGWSFASPMRAFTSSSYSGKRGRTISDSTTSKNTTPNLGAIPSLLSVRS

SEQ ID NO: 33509 - protein, 384 aa, Arabidopsis thaliana
  misc_feature (1)..(384): Ceres Seq. ID no. 13603293
MQCINHPFTKNPGGICAFCLQEKLGKLVTSSFPLPKHLTSSSTSSSPSFRSDSVGSTTTASAANLSASLSLSVSGATNNNNSKLPFLLAKKKKKMLTASSSSSTTANIVYKRSQSTRTTKTTYGDSDLSPRKRNGFWSFFHLYSSKQHGSSKKVGNFHQPISQTETKTELAETTTVGSSSSSSASSSMSKRVVGGGGSSSNRNGIDVIVEEDGSPNIEVTPSERKVSRSRSVGCGSRSFSGDFFERITNGFGDCTLRRVESQREGNNNKGNKVSSNPSNGVREMVRCGGIFGGFMIMTSSSSSSSSSSWVSSSSAEHHHHHNHNMGHGGGGRNRSWGWSFASPMRAFTSSSYSGKRGRTISDSTTSKNTTPNLGAIPSLLSVRS

SEQ ID NO: 33510 - DNA, 1736 bp, Arabidopsis thaliana
  misc_feature (1)..(1736): Ceres Seq. ID no. 13603302
ggtcattcttctttcttttcacttcttcttcttcttcgctcttcttctcactgtcgggttccatttggcgcgaaaagttcttcactttttccagcttttttttgttctctgacagtttttttttttgtttggttacaaataaagatgccagtaagtgtggcactagttttgctgttgacattgagcagtgtgattctgattaatgggagaagttacggcgtcggaaacatatgcgatcgtggtcggagaccgagcgagagaccacacagtgtcaaaatcactgattttggtgctgtgggagatgggaaaacgttgaacacacttgcgtttcaaaatgctgtcttttatctaaagtctttcgctgataaaggtggtgctcagctttatgttcctccgggacggtggctcaccggaagtttcaacctcaccagtcatctcactctctttctcgagaaagacgccgtcatacttgcctcacaggatccatcgcattggcaagtcacggatgccttaccgtcatatgggcggggtattgatctaccagggaagagatacatgagtttgataaacggtgacatgctacatgatgtagtagtaacaggtgataacggtaccatagatgggcaaggccttgtttggtgggatcggtttaattctcattctttagagtacagtcgccctcaccttgtcgagtttgtctctgccgaaaatgtcattgtatcaaatcttacattcttgaacgctccggcttatactatccattcagtttattgtcgcaatttatacattcatagagtaacggctaatacttgtccagaatctccttataccatcggtattgtcccagattcttctgaaaatgtgtgtatccaagaatctagtatcaacatggggtatgatgccatttctcttaaaagtggttgtgatgaatacggtttatcgtatgcaagacctactgctaatgtccagataagaaatgtttaccttagagcagcttctggttcctccatttcctttggtagtgaaatgtctggtggtatatctgatgttgaggtcagtgatgctcacatacacaactcgttatccgggattgcctttagaacaacaaatggaagaggtggttatattaaggagattgatatttccaacatccatatggttaatgttggtactgcatttctagccaacggtagcttcggtactcatccggattctggtttcgatgaaaatgcttacccgcttgtgagtcacatcaggttacatgacattgttggagaaaacataagcactgctggatatttctttggaacgaaagagtctcctttcacttcgattttgttatcgaatatctctctgtcgattaaaaactcggcttcccctgctgattcttggcaatgctcatatgttgacgggtcttcggaattcgtagtccctgaaccgtgccttgagctgaagagttttgatagttactatggtagagctgaggccttatgaaaccaaacttcattaggaatgatgattcatatttgtttaagagagagcaaatggttctgattcttttcttttccccaaaaataaaccacagtgtgtagaattattacctgttccttgttggtgttgttgtccctgttatttgcagcttgtgagattaatatatcttgtacaggttcatttcttcattcatgtgtaaccaaagaaattttgtattagcccagtaaccagatattaattttttt

SEQ ID NO: 33511 - protein, 497 aa, Arabidopsis thaliana
  misc_feature (1)..(497): Ceres Seq. ID no. 13603303
GHSSFFSLLLLLRSSSHCRVPFGAKSSSLFPAFFCSLTVFFFVWLQIKMPVSVALVLLLTLSSVILINGRSYGVGNICDRGRRPSERPHSVKITDFGAVGDGKTLNTLAFQNAVFYLKSFADKGGAQLYVPPGRWLTGSFNLTSHLTLFLEKDAVILASQDPSHWQVTDALPSYGRGIDLPGKRYMSLINGDMLHDVVVTGDNGTIDGQGLVWWDRFNSHSLEYSRPHLVEFVSAENVIVSNLTFLNAPAYTIHSVYCRNLYIHRVTANTCPESPYTIGIVPDSSENVCIQESSINMGYDAISLKSGCDEYGLSYARPTANVQIRNVYLRAASGSSISFGSEMSGGISDVEVSDAHIHNSLSGIAFRTTNGRGGYIKEIDISNIHMVNVGTAFLANGSFGTHPDSGFDENAYPLVSHIRLHDIVGENISTAGYFFGTKESPFTSILLSNISLSIKNSASPADSWQCSYVDGSSEFVVPEPCLELKSFDSYYGRAEAL

SEQ ID NO: 33512 - protein, 449 aa, Arabidopsis thaliana; identical to SEQ ID NO: 29489
  misc_feature (1)..(449): Ceres Seq. ID no. 13603304

SEQ ID NO: 33513 - protein, 312 aa, Arabidopsis thaliana; identical to SEQ ID NO: 29490
  misc_feature (1)..(312): Ceres Seq. ID no. 13603305

SEQ ID NO: 33514 - DNA, 868 bp, Arabidopsis thaliana
  misc_feature (1)..(868): Ceres Seq. ID no. 13603306
atctcctttaaaattctctgttcttttgtattcctaatctttaacaatttaagaagaaatggattcgaattcatggatcaattgtccccctgtgttttcatcatcgccttcttcacgccgttaccaatctcgatcagatttgtatttgggagatgttgaaggagaagacgatttgaaagctgagtttatgtgtcctttttgtgcagatgagtttgatattgttggtctttgttgtcatattgatgtgaatcatcctgttgaagctaagaatggggtttgtcctgtctgcacaaagaaggtgggattggacattgttggccatataacaacgcaacacgggaacgtatttaaggtgcagcgaagaagaaggttgcgtaaaggtggatatagctctacctatcttactcttaaaaaagagcttcgagaagctaacttacagtctcttggagggtcttccactttcattccctcttccaatatagattctgatcctctactctcatcctttatgtttaaacccccttcggctatacctatcactgaaggagactcggtagcacaagtctcacctaaggacacctctaaaagcaaaatacaacaagaatcattctcaaacgaagatcaagagaaggcaaagaagagcaagtttgtgcggggcttgctttggtcaaccatgcttgaagacaagttctaatttatctagatatcttatattgtaatcaatgtatcaagaaatcatacattagtctcaatgtatgtagcagaggcttgtagcaagcataatggcatgctgagtatgttgtaatcggatgttcgtggggtatcttttatgtgcataatcagaagatatataagtactatttcactc

SEQ ID NO: 33515 - protein, 211 aa, Arabidopsis thaliana
  misc_feature (1)..(211): Ceres Seq. ID no. 13603307
MDSNSWINCPPVFSSSPSSRRYQSRSDLYLGDVEGEDDLKAEFMCPFCADEFDIVGLCCHIDVNHPVEAKNGVCPVCTKKVGLDIVGHITTQHGNVFKVQRRRRLRKGGYSSTYLTLKKELREANLQSLGGSSTFIPSSNIDSDPLLSSFMFKPPSAIPITEGDSVAQVSPKDTSKSKIQQESFSNEDQEKAKKSKFVRGLLWSTMLEDKF

SEQ ID NO: 33516 - protein, 168 aa, Arabidopsis thaliana
  misc_feature (1)..(168): Ceres Seq. ID no. 13603308
MCPFCADEFDIVGLCCHIDVNHPVEAKNGVCPVCTKKVGLDIVGHITTQHGNVFKVQRRRRLRKGGYSSTYLTLKKELREANLQSLGGSSTFIPSSNIDSDPLLSSFMFKPPSAIPITEGDSVAQVSPKDTSKSKIQQESFSNEDQEKAKKSKFVRGLLWSTMLEDKF

SEQ ID NO: 33517 - DNA, 704 bp, Arabidopsis thaliana
  misc_feature (1)..(704): Ceres Seq. ID no. 13603309
aaagaacttaaagatattcgtctgattgttctctctcaaattggctcatcctctccattcaattcatcccaagtaccaaagcaagctacttcgatcttcctcttactactctcgtttctaattattgttgttatcttaaatgggttcatctgagaagagatcaaaggatatcatgagtgacataccaactttcagtgcagagaatttgcagaacaatttgaaagtcattcaaaacagccggacgtttctgtctatcatagctggtgtcttagcaggaataattggattcaatggcttgattggttttgtattttactttgtggtgatgttgatcacatctgttgggctcatggctaaggcaggattctcagctgacttgtactttgattcgtggaatcgggttctttttgacggttttcttggtggccttatgtcgtttgtgctgttctggacatttgcgtatgacttggtgcacatattctgagggaacttctgctccagatgaggatggtgaaacggcacacaagattgagttcgggttttgcagcctcttcatctaaactgaattagattgacaatgtttctcttgttccctttttgaacaacagtttatgagttcgtattacctttttttgttatttgagatcacatcaaactgtgaaaacctttagattgaaaagtttcaagtatttacactttcttcc

SEQ ID NO: 33518 - protein, 114 aa, Arabidopsis thaliana
  misc_feature (1)..(114): Ceres Seq. ID no. 13603310
MGSSEKRSKDIMSDIPTFSAENLQNNLKVIQNSRTFLSIIAGVLAGIIGFNGLIGFVFYFVVMLITSVGLMAKAGFSADLYFDSWNRVLFDGFLGGLMSFVLFWTFAYDLVHIF

SEQ ID NO: 33519 - protein, 103 aa, Arabidopsis thaliana
  misc_feature (1)..(103): Ceres Seq. ID no. 13603311
MSDIPTFSAENLQNNLKVIQNSRTFLSIIAGVLAGIIGFNGLIGFVFYFVVMLITSVGLMAKAGFSADLYFDSWNRVLFDGFLGGLMSFVLFWTFAYDLVHIF

SEQ ID NO: 33520 - DNA, 1566 bp, Arabidopsis thaliana
  misc_feature (1)..(1566): Ceres Seq. ID no. 13603322
aagaaaatctcaaatagatataacaagtattctggaagaaagaaaagagagagaaaatgtcgtccagtaaaatccaggtacgagggcagccacttcttagggttccggcaagaaaccaccgtatgacacacttggttgtttgcggcgtttccacaaaacgccaccaccgtgaaatcaatgcactcagcagtaatagtggtccatcgttggattcggtcccaacaagaaccgacaagaggcagtttcttcgtggtgacggtaacggtaaattcgggaggttcggtgggaagtttgtaccggagacattgatgtctcgcctgatagaacttgaagacgaatttaactttgttaggtgcgatcacgaatttcaggaggagcttaccacagcgttaagagactacgtaggaagagaaacgcctctctacttcgccgaacgtctaaccgaacactacaagaacatagttccaaccatcgaaggtggaccagagatatacttgaaacgggaagatcttagccactgtgggtctcacaaaatcaataatgctctcgctcaggccatgatttcccggcggcttggttgcagccgtgtggtggcggccactggagccggacaacatggagtcgccacagcggctgcatgtgcaaagctctccttggagtgtactgttttcatgggagctgctgatatagagaaacaatcctttaatgtactttccatgaaactccttggtgctcaggttatatcagtggaaggaacattcaaagatgcaagttcagaagctatacgaaactgggtcgaaaacctatataccacatactacttatcgggtacggtcgtaggaccgcatccgtgtccgataatagtacgtgagtttcaatctgtgatcgggaaagagacaagaaggcaagccaagcaactatggggtggtaagcctgatgtgttggtggcctgtgtgggaagtggctcaaacgcattgggtttgttccatgagtttgttggggatgaggatgtgcggttagtcggtgtcgaggctgcggggcttggtctggattcggggaaacattcagctactttggcctttggagatgttggtgtataccatggttccatgagctatttattgcaagatgatcaaggacagatacttaaaccacactccgtaggtgttgggttagagtatcccggagttggaccggagattagtttcatgaaagaaactggcagagcggagttctatacagcaacagacgaagaagcaattcaagcgtgcatgcgattaagcagattggagggaataataccggcattagaagcgtctcacgcgctcgcgttcctcgacaaactcgtgcctactcttcgtgatggagccaaggtggtagtgaactgcagtggccgtggtgacaaagatttagatactctcatccaacgaggcatgccttcttctttttgttgactcaccaagatgccacattacacttaactcttttagaaaacgtatggtccaatcacaaccatcattatagatgaaatactaatatatcaatcattatttaatttttcgattt

SEQ ID NO: 33521 - protein, 465 aa, Arabidopsis thaliana
  misc_feature (1)..(465): Ceres Seq. ID no. 13603323
MSSSKIQVRGQPLLRVPARNHRMTHLVVCGVSTKRHHREINALSSNSGPSLDSVPTRTDKRQFLRGDGNGKFGRFGGKFVPETLMSRLIELEDEFNFVRCDHEFQEELTTALRDYVGRETPLYFAERLTEHYKNIVPTIEGGPEIYLKREDLSHCGSHKINNALAQAMISRRLGCSRVVAATGAGQHGVATAAACAKLSLECTVFMGAADIEKQSFNVLSMKLLGAQVISVEGTFKDASSEAIRNWVENLYTTYYLSGTVVGPHPCPIIVREFQSVIGKETRRQAKQLWGGKPDVLVACVGSGSNALGLFHEFVGDEDVRLVGVEAAGLGLDSGKHSATLAFGDVGVYHGSMSYLLQDDQGQILKPHSVGVGLEYPGVGPEISFMKETGRAEFYTATDEEAIQACMRLSRLEGIIPALEASHALAFLDKLVPTLRDGAKVVVNCSGRGDKDLDTLIQRGMPSSFC

SEQ ID NO: 33522 - protein, 443 aa, Arabidopsis thaliana
  misc_feature (1)..(443): Ceres Seq. ID no. 13603324
MTHLVVCGVSTKRHHREINALSSNSGPSLDSVPTRTDKRQFLRGDGNGKFGRFGGKFVPETLMSRLIELEDEFNFVRCDHEFQEELTTALRDYVGRETPLYFAERLTEHYKNIVPTIEGGPEIYLKREDLSHCGSHKINNALAQAMISRRLGCSRVVAATGAGQHGVATAAACAKLSLECTVFMGAADIEKQSFNVLSMKLLGAQVISVEGTFKDASSEAIRNWVENLYTTYYLSGTVVGPHPCPIIVREFQSVIGKETRRQAKQLWGGKPDVLVACVGSGSNALGLFHEFVGDEDVRLVGVEAAGLGLDSGKHSATLAFGDVGVYHGSMSYLLQDDQGQILKPHSVGVGLEYPGVGPEISFMKETGRAEFYTATDEEAIQACMRLSRLEGIIPALEASHALAFLDKLVPTLRDGAKVVVNCSGRGDKDLDTLIQRGMPSSFC

SEQ ID NO: 33523 - protein, 381 aa, Arabidopsis thaliana
  misc_feature (1)..(381): Ceres Seq. ID no. 13603325
MSRLIELEDEFNFVRCDHEFQEELTTALRDYVGRETPLYFAERLTEHYKNIVPTIEGGPEIYLKREDLSHCGSHKINNALAQAMISRRLGCSRVVAATGAGQHGVATAAACAKLSLECTVFMGAADIEKQSFNVLSMKLLGAQVISVEGTFKDASSEAIRNWVENLYTTYYLSGTVVGPHPCPIIVREFQSVIGKETRRQAKQLWGGKPDVLVACVGSGSNALGLFHEFVGDEDVRLVGVEAAGLGLDSGKHSATLAFGDVGVYHGSMSYLLQDDQGQILKPHSVGVGLEYPGVGPEISFMKETGRAEFYTATDEEAIQACMRLSRLEGIIPALEASHALAFLDKLVPTLRDGAKVVVNCSGRGDKDLDTLIQRGMPSSFC

SEQ ID NO: 33524 - DNA, 836 bp, Arabidopsis thaliana
  misc_feature (1)..(836): Ceres Seq. ID no. 13603344
acgatagcctctcatcttcttttttcctctccatcatcttctcttatcaactttagactcacaagcctcctctcatcttcaccataaccgaaaaaccaaacaaaaaatccttagataatcagatcttgatattatggatcatatcatcggctttatgggcacaacaaacatgtcacataacacaaaccttatgatcgctgccgcagccactaccactacgacctcttcgtcttcctcttcgtcctccggaggctcggggactaaccagctaagcaggtacgagaatcagaagagaagagattggaacactttcggacagtatctacgcaatcaccgtccaccactttctctctcccgttgcagtggtgctcatgttcttgaattcctcaggtacctcgaccaattcggcaagactaaggttcacacacacctatgtccgttcttcggacacccaaacccaccagcaccatgtgcctgtccactccgacaagcgtggggtagtctggacgcactcattggccgtcttagagctgcttttgaagagaacggtggttcaccagagacgaacccttttggtgcacgagccgttcgactctacctaagggaagtacgtgactcgcaggctaaagcacgtgggatcagctatgaaaaaaagaagcgcaagcgacctcctccgccactaccaccggctcagccggcgatttcaagtagccctaattaacattaagtcatgagtaagatgtttcaatgaactacgtttgtttacaaatttttatcaatgacgaacatgcacgagttcttttaaagtcacatgccctttcctaaacttttatttg

SEQ ID NO: 33525 - protein, 195 aa, Arabidopsis thaliana; identical to SEQ ID NO: 30952
  misc_feature (1)..(195): Ceres Seq. ID no. 13603345

SEQ ID NO: 33526 - protein, 188 aa, Arabidopsis thaliana; identical to SEQ ID NO: 30953
  misc_feature (1)..(188): Ceres Seq. ID no. 13603346

SEQ ID NO: 33527 - protein, 183 aa, Arabidopsis thaliana; identical to SEQ ID NO: 30954
  misc_feature (1)..(183): Ceres Seq. ID no. 13603347

SEQ ID NO: 33528 - DNA, 1110 bp, Arabidopsis thaliana
  misc_feature (1)..(1110): Ceres Seq. ID no. 13603350
ataattaaagtcttcttcttcttcttcttctctacaaattatctcactctcttcgtttttttttccttctcaacaatggcgacttcttctactttctcgtcactactaccttcaccaccagctcttctttccgaccaccgttctcctccaccatccatcagatactccttttctcccttaactactccaaaatcgtctcgtttgggtttcactgtaccggagaagagaaacctcgctgctaattcgtctctcgttgaagtatccattggcggagaaagtgacccaccaccatcatcatctggatcaggaggagacgacaagcaaattgcattactcaaactcaaattacttagtgtagtttcgggattaaacagaggacttgtggcgagtgttgatgatttagaaagagctgaagtggctgctaaagaacttgaaactgctgggggaccggttgatttaaccgatgatcttgataagcttcaagggaaatggaggctgttgtatagtagtgcgttctcttctcggtctttaggtggtagccgtcctggtctacctactggacgtttgatccctgttactcttggccaggtgtttcaacggattgatgtgtttagcaaagattttgataacatagcagaggtggaattaggagccccttggccatttccgccattagaagccactgcgacattggcacacaagtttgaactcttaggcacttgcaagatcaagataacatttgagaaaacaactgtgaagacatcgggaaacttgtcgcagattcctccgtttgatatcccgaggcttcccgacagtttcagaccatcgtcaaaccctggaactggggatttcgaagttacctatgttgatgataccatgcgcataactcgcggggacagaggtgaacttagggtattcgtcattgcttaattctcaaagctttgacatgtaaagataaataaatactttctgcttgatgcagtctcatgagttttgtacaaatcatgtgaacatataaatgcgctttataagtaaatgagtgtcttgttcaatgaatcatatgaaagaatttgtatgactcagaaaattggacaatgatatagaccttcc

SEQ ID NO: 33529 - protein, 309 aa, Arabidopsis thaliana
  misc_feature (1)..(309): Ceres Seq. ID no. 13603351
IIKVFFFFFFSTNYLTLFVFFSFSTMATSSTFSSLLPSPPALLSDHRSPPPSIRYSFSPLTTPKSSRLGFTVPEKRNLAANSSLVEVSIGGESDPPPSSSGSGGDDKQIALLKLKLLSVVSGLNRGLVASVDDLERAEVAAKELETAGGPVDLTDDLDKLQGKWRLLYSSAFSSRSLGGSRPGLPTGRLIPVTLGQVFQRIDVFSKDFDNIAEVELGAPWPFPPLEATATLAHKFELLGTCKIKITFEKTTVKTSGNLSQIPPFDIPRLPDSFRPSSNPGTGDFEVTYVDDTMRITRGDRGELRVFVIA

SEQ ID NO: 33530 - protein, 284 aa, Arabidopsis thaliana
  misc_feature (1)..(284): Ceres Seq. ID no. 13603352
MATSSTFSSLLPSPPALLSDHRSPPPSIRYSFSPLTTPKSSRLGFTVPEKRNLAANSSLVEVSIGGESDPPPSSSGSGGDDKQIALLKLKLLSVVSGLNRGLVASVDDLERAEVAAKELETAGGPVDLTDDLDKLQGKWRLLYSSAFSSRSLGGSRPGLPTGRLIPVTLGQVFQRIDVFSKDFDNIAEVELGAPWPFPPLEATATLAHKFELLGTCKIKITFEKTTVKTSGNLSQIPPFDIPRLPDSFRPSSNPGTGDFEVTYVDDTMRITRGDRGELRVFVIA

SEQ ID NO: 33531 - DNA, 945 bp, Arabidopsis thaliana
  misc_feature (1)..(945): Ceres Seq. ID no. 13603353
gtctgtctgagtggattcgtatactatattgtgatgagagtcaccacaacaaattcgttgacatgagcctttcatatatttttgaattatactgaactaaaacccatttaaaagcccatttaaagacccattataagagtagagatactcagcccatttaaagataaaattacgtcatagcgatttttccattaaaagagtgaggaagagacaaaagtgattgattggtcagaaaaaatggaagcggcgaagaaacagagtgttacaaatcagcttctcgccgtgaaatcagcttccggcaagacttttagccagttagccgcggagacaggtctaaccaacgtatacgtagctcagcttctccgtcgtcaagctcagctcaaaccggacacagtcccaaagcttaaggaagctttaccagctctgaccgatgaactaatcggagatatgatgtctcctccgtggagatcctatgatcctaatctcatccaagaacccactatctacaggttgaatgaagcagtgatgcattttggtgagagtataaaggagattatcaatgaagattttggagatggcatcatgtcggcgatagatttctattgctctgtcgacaaaatcaaaggagtggatggtaacaatcgcgtggttgtgacgcttgatggaaagtatctttcgcattccgaacagaggacggagaatatggtctcaaggctaaatctcaagggaggtacaagcgaatgataagaaagcctttacgtatccatgaaggccttattgtaagtggtaacgttgtaatacctatgtgtttgtttatctgtaatatatgcaacttcagcatctagattaaaagctgtttcaggttgaataacagtgaataaacaaaacttataaaacctttctatgtttatctttaacatcgtaatcgagttccgattcatgctt

SEQ ID NO: 33532 - protein, 168 aa, Arabidopsis thaliana
  misc_feature (1)..(168): Ceres Seq. ID no. 13603354
MEAAKKQSVTNQLLAVKSASGKTFSQLAAETGLTNVYVAQLLRRQAQLKPDTVPKLKEALPALTDELIGDMMSPPWRSYDPNLIQEPTIYRLNEAVMHFGESIKEIINEDFGDGIMSAIDFYCSVDKIKGVDGNNRVVVTLDGKYLSHSEQRTENMVSRLNLKGGTSE

SEQ ID NO: 33533 - protein, 98 aa, Arabidopsis thaliana
  misc_feature (1)..(98): Ceres Seq. ID no. 13603355
MMSPPWRSYDPNLIQEPTIYRLNEAVMHFGESIKEIINEDFGDGIMSAIDFYCSVDKIKGVDGNNRVVVTLDGKYLSHSEQRTENMVSRLNLKGGTSE

SEQ ID NO: 33534 - protein, 97 aa, Arabidopsis thaliana
  misc_feature (1)..(97): Ceres Seq. ID no. 13603356
MSPPWRSYDPNLIQEPTIYRLNEAVMHFGESIKEIINEDFGDGIMSAIDFYCSVDKIKGVDGNNRVVVTLDGKYLSHSEQRTENMVSRLNLKGGTSE

SEQ ID NO: 33535 - DNA, 928 bp, Arabidopsis thaliana
  misc_feature (1)..(928): Ceres Seq. ID no. 13603362
ctttgtatcatctctctgtttttccgaagaactaacacatgtcgggacctcagtgctgtgaaaacccgccaactcttaacccggtttccgggtcgggtcatgtcgagaagctgggtgggcttgatgcctacgtctccggctctgccgagtccaagctctgcgtcctcctcatttctgatatttttggttttgaagctccaaacttaagggcgcttgcggacaaggttgcagcttctggattctatgttgtggttcctgattactttggtggagatccttataatccctctaaccaggacagacccatccctgtctggatcaaagaccatggctgtgataagggctttgaaaacacgaaaccagtacttgaaaccataaagaacaaaggcataactgccattggagccgcagggatgtgttggggtgcaaaagtagtggtggaactgtctaaagaagagcttattcaagcagctgtgttgcttcatccttcttttgtcaatgttgatgatatcaaaggtgggaaggctccaattgctatattaggagctgaaattgatcaaatgtccccaccagcactcttgaagcaatttgaggagattctatcttccaaacccgaggtgaatagttacgtgaagatacacccgaaagtgtcacacggatggacagttagatacaacatcgatgaaccagaggcggttaaagcagcagaagaagctcacaaggagatgcttgattggtttgtgacctacatcaaatgatttgagaaagaaagaaaggtattgtctattacttcatatatgcaaagaataaaaattaaagagagacaaagcaaaactcttggttggtgtttcaatttctactttctatagtcttttgaagcattctctgagattctgtgataccttttgttaatcattgttttatgatt

SEQ ID NO: 33536 - protein, 239 aa, Arabidopsis thaliana
  misc_feature (1)..(239): Ceres Seq. ID no. 13603363
MSGPQCCENPPTLNPVSGSGHVEKLGGLDAYVSGSAESKLCVLLISDIFGFEAPNLRALADKVAASGFYVVVPDYFGGDPYNPSNQDRPIPVWIKDHGCDKGFENTKPVLETIKNKGITAIGAAGMCWGAKVVVELSKEELIQAAVLLHPSFVNVDDIKGGKAPIAILGAEIDQMSPPALLKQFEEILSSKPEVNSYVKIHPKVSHGWTVRYNIDEPEAVKAAEEAHKEMLDWFVTYIK

SEQ ID NO: 33537 - DNA, 1307 bp, Arabidopsis thaliana
  misc_feature (1)..(1307): Ceres Seq. ID no. 13603364
atatcaatcaatcgaaaaacctttctctcttctttcggagccgtcgcttgtgaaactttccggcgatttaacagagtcatgatggaaatacgaactccgaagactggcaaagccaagcgtgttctcgaaagccgagctcctaagttggttgaaactgggaagaagacgttgatacttcatggaacaaagacgagtgctacacttagctctgtaatgacggaactctaccgtttgaagaagggaggtgccatcagatattcaaggaggaatgagaatattaggcctttcgagagtggaggtgaaacttcattagagttcttctctcagaaaacagattgtagcatttttgtgtatggttctcacacgaagaaacgacctgacaatcttgtacttgggagaatgtatgatcaccaagtctatgatcttatagaagttgggattgagaactttaaatccttgcgggcgttttcgtatgacaagaaattcgcacctcatgaaggaacaaagcctttcatttgctttattggtgaaggttttgagaatgtatcagagcttaagcatctcaaagaagtcctcactgatctttttcgtggcgaggttgtggataatctaaatcttactggtttagaccgcgcttacgtatgttcagctatatccccaacaaaggttttccttactcattgcgcattgaagcttaaaaagtcaggatccattgttccgagaatggagcttgttgaagtcggtccatccatggacttggttatcaggcgtaatcgtcttcctaacgatagcttaatgaaagaagcaatgagaacatccaaggataagcctaagaagaaggagaaaaacgttgatcaagatgcagtactagggaagactgggaagatttatatgcctgatcagaagctgaaagaaatgaaactgttcgataaatctaagggatcgaagagagagcggaaagacgctaagcttaagcataaggaagagactgttgccaaaaagatgaaggtgtcttctgagtgactcaacagaccactcttggctctgcatcaacagctttcaatatgtggaagatgaaatgattttgtagtgtaatgagcttgacttttatttttccattagaatctataactgaatgttttctatacgctaatattttattaaggtgattttgttttgttaaaactctgcagcaacagaaactggatatgataaaaacacatttttgtctatctctgtttcctactgcagtacatgcgtaagacagcaacttttttcccgtgttgaatgagaccacaatttttgcc

SEQ ID NO: 33538 - protein, 340 aa, Arabidopsis thaliana
  misc_feature (1)..(340): Ceres Seq. ID no. 13603365
ISINRKTFLSSFGAVACETFRRFNRVMMEIRTPKTGKAKRVLESRAPKLVETGKKTLILHGTKTSATLSSVMTELYRLKKGGAIRYSRRNENIRPFESGGETSLEFFSQKTDCSIFVYGSHTKKRPDNLVLGRMYDHQVYDLIEVGIENFKSLRAFSYDKKFAPHEGTKPFICFIGEGFENVSELKHLKEVLTDLFRGEVVDNLNLTGLDRAYVCSAISPTKVFLTHCALKLKKSGSIVPRMELVEVGPSMDLVIRRNRLPNDSLMKEAMRTSKDKPKKKEKNVDQDAVLGKTGKIYMPDQKLKEMKLFDKSKGSKRERKDAKLKHKEETVAKKMKVSSE

SEQ ID NO: 33539 - protein, 314 aa, Arabidopsis thaliana
  misc_feature (1)..(314): Ceres Seq. ID no. 13603366
MMEIRTPKTGKAKRVLESRAPKLVETGKKTLILHGTKTSATLSSVMTELYRLKKGGAIRYSRRNENIRPFESGGETSLEFFSQKTDCSIFVYGSHTKKRPDNLVLGRMYDHQVYDLIEVGIENFKSLRAFSYDKKFAPHEGTKPFICFIGEGFENVSELKHLKEVLTDLFRGEVVDNLNLTGLDRAYVCSAISPTKVFLTHCALKLKKSGSIVPRMELVEVGPSMDLVIRRNRLPNDSLMKEAMRTSKDKPKKKEKNVDQDAVLGKTGKIYMPDQKLKEMKLFDKSKGSKRERKDAKLKHKEETVAKKMKVSSE

SEQ ID NO: 33540 - protein, 313 aa, Arabidopsis thaliana
  misc_feature (1)..(313): Ceres Seq. ID no. 13603367
MEIRTPKTGKAKRVLESRAPKLVETGKKTLILHGTKTSATLSSVMTELYRLKKGGAIRYSRRNENIRPFESGGETSLEFFSQKTDCSIFVYGSHTKKRPDNLVLGRMYDHQVYDLIEVGIENFKSLRAFSYDKKFAPHEGTKPFICFIGEGFENVSELKHLKEVLTDLFRGEVVDNLNLTGLDRAYVCSAISPTKVFLTHCALKLKKSGSIVPRMELVEVGPSMDLVIRRNRLPNDSLMKEAMRTSKDKPKKKEKNVDQDAVLGKTGKIYMPDQKLKEMKLFDKSKGSKRERKDAKLKHKEETVAKKMKVSSE

SEQ ID NO: 33541 - DNA, 710 bp, Arabidopsis thaliana
  misc_feature (1)..(710): Ceres Seq. ID no. 13603379
catcctctcactgcctcttttctcactcactgttacttcgctaaaaccctaatttcgccattcccttctctaagttttgtgtgtagacatttagaaatggctttctgcaacaaacttagcggtatcttgagacaaggggtttctcagagctcaaatggtccagttacatctatgcttggctctcttcgttacatgtcctctaagctttttgttggtggtctctcttggggaactgatgacagctccttaaagcaagctttcactagctttggtgaagtcacagaagcaacggtgattgcagacagagagacagggaggtcgaggggattcggatttgttagcttcagctgtgaggattctgctaacaatgccataaaagaaatggatggaaaggagctgaatggtaggcaaatccgtgtgaatcttgcaaccgaaagatcgagtgccccgagatcatcatttggtggtggtggcggttacggtggtggcggtggtggtggctactaaagcaaacaagccagaggatttgagagagagaggagcctcagaactttcagtagttagttagtttgtttgtttcctctttgtttaactgcaaataaccttaactggttttgttaaacttatttagccctgttttttggttgtgtctgaataccgtagtattgttgctccatcttctgcaaatctattagcatcgagttcgattc

SEQ ID NO: 33542 - protein, 168 aa, Arabidopsis thaliana
  misc_feature (1)..(168): Ceres Seq. ID no. 13603380
HPLTASFLTHCYFAKTLISPFPSLSFVCRHLEMAFCNKLSGILRQGVSQSSNGPVTSMLGSLRYMSSKLFVGGLSWGTDDSSLKQAFTSFGEVTEATVIADRETGRSRGFGFVSFSCEDSANNAIKEMDGKELNGRQIRVNLATERSSAPRSSFGGGGGYGGGGGGGY

SEQ ID NO: 33543 - protein, 136 aa, Arabidopsis thaliana
  misc_feature (1)..(136): Ceres Seq. ID no. 13603381
MAFCNKLSGILRQGVSQSSNGPVTSMLGSLRYMSSKLFVGGLSWGTDDSSLKQAFTSFGEVTEATVIADRETGRSRGFGFVSFSCEDSANNAIKEMDGKELNGRQIRVNLATERSSAPRSSFGGGGGYGGGGGGGY

SEQ ID NO: 33544 - protein, 111 aa, Arabidopsis thaliana
  misc_feature (1)..(111): Ceres Seq. ID no. 13603382
MLGSLRYMSSKLFVGGLSWGTDDSSLKQAFTSFGEVTEATVIADRETGRSRGFGFVSFSCEDSANNAIKEMDGKELNGRQIRVNLATERSSAPRSSFGGGGGYGGGGGGGY

SEQ ID NO: 33545 - DNA, 1445 bp, Arabidopsis thaliana
  misc_feature (1)..(1445): Ceres Seq. ID no. 13603383
actcagaatcatctttgtcaatatttctctaccatcttttgtctcatagccatgggtctagttcaagaagagggaagcggtcctgttcatggctttcggttatcaaccgtgagtgcgtccctgccgtcagagacaggtacgacccacgagcccaccggtttagacctcgccatgaagctccactacctaaaggcggtttacatttactcggccgggacagcacgtgacttgactgtgatggacgtgaaggcgcctttgttttcagtgttctaccagatcccttgcatcattggcaggttcaggcgacatgaatcgggacgtccgtacctaaagtgcaacgactgtggcacacgtttcgtggagagtcattgtgatctcactgtggaggagtggctccgtgtaccggaccggtccgttgatgagtctttggtttaccatcaaccagttggaccagatttggcattctctcctttgctctatattcagatgacccggtttagctgcggtggattagctttgggcttaagctgggctcatatcatgggagatccattctctctttctcatttcttcaacttatgggctcaagcctttgctggtgggaagatctactgccccaaaacctctgtcacagagagagactttcaaaacccgacctcaacattcaaaaaaccggattcagtcaaacaggttgacctggttggagatctctgggtcgctccgaataacagcaaaatgacaacattctccttcaatttaacggttaacgatttaaaaacacattttccggtgaacggagacggcgaattcgagattctcactggaatcatatggaaatgtgttgcgacggtgaggggagaatcagctccggtgacgattacggttatcagatcggatccgaagaagttgaagcctagagcggtgagaaatggtcagatgataagttccattcacgtcgatttctcggtggcggaggcgagtttggaggagattgtgaaatcgatcggtgaagcgaaagatgagagggttgtgatcgatgagattgttgatgatgtttcggattttattgtttacggagcgaatttaacgtttgtggatatgagtgaagttgatttttatgaggcgaaagttatggggaaatcgccggaatcggtttattgtaatgttcaggggattggggacgacggagcagtggtggttttaccgggggttgtggaggaggagagggttgtgacggtgacattaccggtggatgagattgagaaggtgaaatgggaaatgaagaaatgtggtttgatcacgccgttagtttaacggtgaatgaagaaatcattttatgcggttatcgttaatcgtgttttttattgtttgtttgggtttttattttatttggtgtgttttatataaaatcaaataaatgtcatttttataatttatgtttgtag

SEQ ID NO: 33546 - protein, 437 aa, Arabidopsis thaliana
  misc_feature (1)..(437): Ceres Seq. ID no. 13603384
TQNHLCQYFSTIFCLIAMGLVQEEGSGPVHGFRLSTVSASLPSETGTTHEPTGLDLAMKLHYLKAVYIYSAGTARDLTVMDVKAPLFSVFYQIPCIIGRFRRHESGRPYLKCNDCGTRFVESHCDLTVEEWLRVPDRSVDESLVYHQPVGPDLAFSPLLYIQMTRFSCGGLALGLSWAHIMGDPFSLSHFFNLWAQAFAGGKIYCPKTSVTERDFQNPTSTFKKPDSVKQVDLVGDLWVAPNNSKMTTFSFNLTVNDLKTHFPVNGDGEFEILTGIIWKCVATVRGESAPVTITVIRSDPKKLKPRAVRNGQMISSIHVDFSVAEASLEEIVKSIGEAKDERVVIDEIVDDVSDFIVYGANLTFVDMSEVDFYEAKVMGKSPESVYCNVQGIGDDGAVVVLPGVVEEERVVTVTLPVDEIEKVKWEMKKCGLITPLV

SEQ ID NO: 33547 - protein, 420 aa, Arabidopsis thaliana
  misc_feature (1)..(420): Ceres Seq. ID no. 13603385
MGLVQEEGSGPVHGFRLSTVSASLPSETGTTHEPTGLDLAMKLHYLKAVYIYSAGTARDLTVMDVKAPLFSVFYQIPCIIGRFRRHESGRPYLKCNDCGTRFVESHCDLTVEEWLRVPDRSVDESLVYHQPVGPDLAFSPLLYIQMTRFSCGGLALGLSWAHIMGDPFSLSHFFNLWAQAFAGGKIYCPKTSVTERDFQNPTSTFKKPDSVKQVDLVGDLWVAPNNSKMTTFSFNLTVNDLKTHFPVNGDGEFEILTGIIWKCVATVRGESAPVTITVIRSDPKKLKPRAVRNGQMISSIHVDFSVAEASLEEIVKSIGEAKDERVVIDEIVDDVSDFIVYGANLTFVDMSEVDFYEAKVMGKSPESVYCNVQGIGDDGAVVVLPGVVEEERVVTVTLPVDEIEKVKWEMKKCGLITPLV

SEQ ID NO: 33548 - protein, 380 aa, Arabidopsis thaliana
  misc_feature (1)..(380): Ceres Seq. ID no. 13603386
MKLHYLKAVYIYSAGTARDLTVMDVKAPLFSVFYQIPCIIGRFRRHESGRPYLKCNDCGTRFVESHCDLTVEEWLRVPDRSVDESLVYHQPVGPDLAFSPLLYIQMTRFSCGGLALGLSWAHIMGDPFSLSHFFNLWAQAFAGGKIYCPKTSVTERDFQNPTSTFKKPDSVKQVDLVGDLWVAPNNSKMTTFSFNLTVNDLKTHFPVNGDGEFEILTGIIWKCVATVRGESAPVTITVIRSDPKKLKPRAVRNGQMISSIHVDFSVAEASLEEIVKSIGEAKDERVVIDEIVDDVSDFIVYGANLTFVDMSEVDFYEAKVMGKSPESVYCNVQGIGDDGAVVVLPGVVEEERVVTVTLPVDEIEKVKWEMKKCGLITPLV

SEQ ID NO: 33549 - DNA, 1256 bp, Arabidopsis thaliana
  misc_feature (1)..(1256): Ceres Seq. ID no. 13603387
actattggttcctctgctctggctcatggatgaaactaccagagagatgttctcacctcataatcttcctcttgaaatgatggaagagattctcttaagactacccgtaaagtcattgacgcgattcaaatgcgtttgcagctcctggagatctttgatctcagagactctgtttgctctgaaacacgctttgatcttggagacatcgaaggcaactacttccacgaagagtccttacggagtcataacaacgtctcggtaccatctcaagtcatgctgcatccattctctctacaacgcgtcaacggtctacgtctcagaacatgatggtgagcttttaggaagagattactatcaagtcgtggggacgtgccatggattggtttgtttccacgtagattacgacaaaagtctctacctgtggaatccaaccatcaagcttcaacaaagattgtctagttcggatcttgaaacgagcgatgatgagtgtgttgtaacgtatgggtttggttatgatgaatctgaagatgactataaagtggttgcgttgttgcaacaaagacaccaagtgaagatagagacaaagatctactcaacgagacaaaagctatggagaagcaacacaagtttcccatctggagttgttgttgctgacaaatcaagatccggaatctacatcaacgggacactaaactgggcagccacttcctcatcatcgtcatggacgatcatatcgtatgatatgtcacgcgatgagttcaaggagcttccagggccagtttgttgtggcagaggatgttttacaatgacgcttggagatttaagaggatgtctttcgatggtgtgttattgcaaaggagctaatgcagatgtttgggtgatgaaggagtttggagaagtatattcttggtctaaactcttgagcattcctggtttgaccgactttgttcgaccgctttggatctcagacggtttagtggttttattggagtttagatccggtttagctctctataactgttccaatggaaggtttcattacccagtttcaaacagcataagtggttgtcgtgacgccaaagtttatctcaagacaatggtttctccaaatgatctttgagatataaaaaattgttcctaatgtttctatccaagattttatttaaaaaattagctcgattcgatttaactaagattggtatcaattgatagaaaagaaacagtacttatatggatatttaaattcaagaattaat

SEQ ID NO: 33550 - protein, 372 aa, Arabidopsis thaliana
  misc_feature (1)..(372): Ceres Seq. ID no. 13603388
LLVPLLWLMDETTREMFSPHNLPLEMMEEILLRLPVKSLTRFKCVCSSWRSLISETLFALKHALILETSKATTSTKSPYGVITTSRYHLKSCCIHSLYNASTVYVSEHDGELLGRDYYQVVGTCHGLVCFHVDYDKSLYLWNPTIKLQQRLSSSDLETSDDECVVTYGFGYDESEDDYKVVALLQQRHQVKIETKIYSTRQKLWRSNTSFPSGVVVADKSRSGIYINGTLNWAATSSSSSWTIISYDMSRDEFKELPGPVCCGRGCFTMTLGDLRGCLSMVCYCKGANADVWVMKEFGEVYSWSKLLSIPGLTDFVRPLWISDGLVVLLEFRSGLALYNCSNGRFHYPVSNSISGCRDAKVYLKTMVSPNDL

SEQ ID NO: 33551 - protein, 364 aa, Arabidopsis thaliana
  misc_feature (1)..(364): Ceres Seq. ID no. 13603389
MDETTREMFSPHNLPLEMMEEILLRLPVKSLTRFKCVCSSWRSLISETLFALKHALILETSKATTSTKSPYGVITTSRYHLKSCCIHSLYNASTVYVSEHDGELLGRDYYQVVGTCHGLVCFHVDYDKSLYLWNPTIKLQQRLSSSDLETSDDECVVTYGFGYDESEDDYKVVALLQQRHQVKIETKIYSTRQKLWRSNTSFPSGVVVADKSRSGIYINGTLNWAATSSSSSWTIISYDMSRDEFKELPGPVCCGRGCFTMTLGDLRGCLSMVCYCKGANADVWVMKEFGEVYSWSKLLSIPGLTDFVRPLWISDGLVVLLEFRSGLALYNCSNGRFHYPVSNSISGCRDAKVYLKTMVSPNDL

SEQ ID NO: 33552 - protein, 357 aa, Arabidopsis thaliana
  misc_feature (1)..(357): Ceres Seq. ID no. 13603390
MFSPHNLPLEMMEEILLRLPVKSLTRFKCVCSSWRSLISETLFALKHALILETSKATTSTKSPYGVITTSRYHLKSCCIHSLYNASTVYVSEHDGELLGRDYYQVVGTCHGLVCFHVDYDKSLYLWNPTIKLQQRLSSSDLETSDDECVVTYGFGYDESEDDYKVVALLQQRHQVKIETKIYSTRQKLWRSNTSFPSGVVVADKSRSGIYINGTLNWAATSSSSSWTIISYDMSRDEFKELPGPVCCGRGCFTMTLGDLRGCLSMVCYCKGANADVWVMKEFGEVYSWSKLLSIPGLTDFVRPLWISDGLVVLLEFRSGLALYNCSNGRFHYPVSNSISGCRDAKVYLKTMVSPNDL

SEQ ID NO: 33553 - DNA, 886 bp, Arabidopsis thaliana
  misc_feature (1)..(886): Ceres Seq. ID no. 13603402
acaaacaaaacaaaaccagagatttcgttatccactgaagttcgtttgcttctgtcaaatttgccaaatcgtaaccaaaaaaagatggcagcttcttctccatctctccttctaccactaggttcagcatctagaaatggtctaaccaccaagaatccaaattcatcaagatatatagctgcaagagtcatagcttcagaaacaagagagcaaagctgtaaaatcagtaatctctctagccgtagagaagcaatgcttttggtactcggcgtctcaggaggattatcaatgagctcacttgcggcgtatgcagctggtttacctccagaagataaaccaagactctgtgaagcagaatgcgagaaagagcttgaaaatgttccaatggtaactacagagtcagggcttcagtataaggatattaaagttggtagaggcccgagtccaccggttggttttcaggttgctgctaattatgtggctatggttccatcagggcaaatattcgacagttctctggagaaaggtctaccgtatctatttcgcgttggctctggccaggtgatcaaaggacttgatgaaggaatcttgagtatgaaagctggtggcaaacgtagactctacatcccagggcctttggcgtttccaaagggtctagtttcagctccagggaggccgagagttgcgccaaacagcccggtgatatttgacgtgagcttagagttcataccaggtctcgattcagaggaagagtgaaactctgttttttcaagtgcaaattgtaatcttccatacacaattacaagattctatgtatgatatttatctcattgtactcattcattgaagaacatcacattgattaaaaacgtcagtatttttcaat

SEQ ID NO: 33554 - protein, 251 aa, Arabidopsis thaliana
  misc_feature (1)..(251): Ceres Seq. ID no. 13603403
TNKTKPEISLSTEVRLLLSNLPNRNQKKMAASSPSLLLPLGSASRNGLTTKNPNSSRYIAARVIASETREQSCKISNLSSRREAMLLVLGVSGGLSMSSLAAYAAGLPPEDKPRLCEAECEKELENVPMVTTESGLQYKDIKVGRGPSPPVGFQVAANYVAMVPSGQIFDSSLEKGLPYLFRVGSGQVIKGLDEGILSMKAGGKRRLYIPGPLAFPKGLVSAPGRPRVAPNSPVIFDVSLEFIPGLDSEEE

SEQ ID NO: 33555 - protein, 223 aa, Arabidopsis thaliana
  misc_feature (1)..(223): Ceres Seq. ID no. 13603404
MAASSPSLLLPLGSASRNGLTTKNPNSSRYIAARVIASETREQSCKISNLSSRREAMLLVLGVSGGLSMSSLAAYAAGLPPEDKPRLCEAECEKELENVPMVTTESGLQYKDIKVGRGPSPPVGFQVAANYVAMVPSGQIFDSSLEKGLPYLFRVGSGQVIKGLDEGILSMKAGGKRRLYIPGPLAFPKGLVSAPGRPRVAPNSPVIFDVSLEFIPGLDSEEE

SEQ ID NO: 33556 - protein, 167 aa, Arabidopsis thaliana
  misc_feature (1)..(167): Ceres Seq. ID no. 13603405
MLLVLGVSGGLSMSSLAAYAAGLPPEDKPRLCEAECEKELENVPMVTTESGLQYKDIKVGRGPSPPVGFQVAANYVAMVPSGQIFDSSLEKGLPYLFRVGSGQVIKGLDEGILSMKAGGKRRLYIPGPLAFPKGLVSAPGRPRVAPNSPVIFDVSLEFIPGLDSEEE

SEQ ID NO: 33557 - DNA, 1487 bp, Arabidopsis thaliana
  misc_feature (1)..(1487): Ceres Seq. ID no. 13603431
gaagccgcaaagaaagcggcggtggaagctgagacatgcaacaatggcgttcgtgtcattctcttcttctccttctctctctcttacactcgcgattcaacattaatttcgttcttcttcatacacatatatagatagtgtcttcattttccaaccatgaccggtagagaaatcctccacaagatgaaggaatccgtcaaggagaaagttgggcttggtgcatctgcttcatctgcagattcagggaaaggtaagagcaagatgttgaagcagatcacacatggttttcatttggtgaaagggaaagcttttcacgagatggaagattatgtggttgccaaattcaaggaagttgatgataatgagcttggtctgtttgctatcttcgatggccatcttagccacgagattccggactacttgtgctcccatttgtttgagaacatcttgaaagagccgaatttctggcaagaacctgagaaagcgataaagaaagcttactatataacggatacaacgattctagacaaggcagatgatttgggaaaaggaggttctactgctgtgactgcgatattgatcaattgccagaagctggtggttgctaatgttggtgactctcgagctgttatttgccaaaatggtgttgcgaagccactctcagttgatcatgagccgaacatggagaaggatgaaatcgagaacagaggaggattcgtttctaactttcctggggatgttcctcgagttgatggtcaactggctgtggcaagggcatttggtgataagagtttaaagatgcatttgagttcagaaccatatgttacggtggagataattgatgatgatgcagaatttcttatcctagcaagtgatggactatggaaggtcatgtcaaaccaagaagccgttgactcaatcaagggaataaaagatgcgaaggctgcagcaaagcaccttgcagaggaggctgttgcaaggaaaagctcagacgatatctcagtcgtcgtcgtgaaatttcagtgacattagctttcggagaagagacctctgcagactgcagatccctttcatcgcaagtcttactggtcacttaaacaagtaaagagtctttgagattggaccagctaaagaaagaatcacaagtatgggcgtttcctctgtaagatgcaattatcacctctatgttactcttttctttttttccttttcaactctgtgattatctctaagtctgtttctttctgggaataaaattttaacagtgaaaaactttctttgcttctctttttttttgttgtaaatgttttttgttatacaatagggcagtgtaagaaagatgaaatagttagaattagtgggtagtgaaagagacaggacataaaaggtttcacatgccaaactgtactcatgtctcgagtctatgacctaagcttttggggttgttatttacaataacagaataaataagcgttgtcccttttttc

SEQ ID NO: 33558 - protein, 289 aa, Arabidopsis thaliana
  misc_feature (1)..(289): Ceres Seq. ID no. 13603432
MTGREILHKMKESVKEKVGLGASASSADSGKGKSKMLKQITHGFHLVKGKAFHEMEDYVVAKFKEVDDNELGLFAIFDGHLSHEIPDYLCSHLFENILKEPNFWQEPEKAIKKAYYITDTTILDKADDLGKGGSTAVTAILINCQKLVVANVGDSRAVICQNGVAKPLSVDHEPNMEKDEIENRGGFVSNFPGDVPRVDGQLAVARAFGDKSLKMHLSSEPYVTVEIIDDDAEFLILASDGLWKVMSNQEAVDSIKGIKDAKAAAKHLAEEAVARKSSDDISVVVVKFQ

SEQ ID NO: 33559 - protein, 280 aa, Arabidopsis thaliana
  misc_feature (1)..(280): Ceres Seq. ID no. 13603433
MKESVKEKVGLGASASSADSGKGKSKMLKQITHGFHLVKGKAFHEMEDYVVAKFKEVDDNELGLFAIFDGHLSHEIPDYLCSHLFENILKEPNFWQEPEKAIKKAYYITDTTILDKADDLGKGGSTAVTAILINCQKLVVANVGDSRAVICQNGVAKPLSVDHEPNMEKDEIENRGGFVSNFPGDVPRVDGQLAVARAFGDKSLKMHLSSEPYVTVEIIDDDAEFLILASDGLWKVMSNQEAVDSIKGIKDAKAAAKHLAEEAVARKSSDDISVVVVKFQ

SEQ ID NO: 33560 - protein, 254 aa, Arabidopsis thaliana
  misc_feature (1)..(254): Ceres Seq. ID no. 13603434
MLKQITHGFHLVKGKAFHEMEDYVVAKFKEVDDNELGLFAIFDGHLSHEIPDYLCSHLFENILKEPNFWQEPEKAIKKAYYITDTTILDKADDLGKGGSTAVTAILINCQKLVVANVGDSRAVICQNGVAKPLSVDHEPNMEKDEIENRGGFVSNFPGDVPRVDGQLAVARAFGDKSLKMHLSSEPYVTVEIIDDDAEFLILASDGLWKVMSNQEAVDSIKGIKDAKAAAKHLAEEAVARKSSDDISVVVVKFQ

SEQ ID NO: 33561 - DNA, 1263 bp, Arabidopsis thaliana
  misc_feature (1)..(1263): Ceres Seq. ID no. 13603447
aatctcagaatacaaaaaagaaaatcaaagaagatagttttgtgattgttttctataaaaagtgcagatattttctttgtcctagagaaagaggtgataggaaaaatgggtctccaagagcttgacccgttagcccaattgagcttaccgccgggttttcggttttatccgactgacgaagagctgatggttgaatatctctgtagaaaagccgccggtcacgacttctctctccagctcatagctgaaatcgatctctacaagtttgatccatgggttttaccaagtaaggcgttattcggtgaaaaagaatggtattttttcagcccgagggataggaagtatccaaacgggtcaagacctaatcgggttgccgggtcgggttattggaaagccaccggtacggataaagttatctcgacggagggaagaagagttggtatcaagaaagctttggtgttttacattggaaaagctccaaaaggaaccaaaaccaattggattatgcatgagtaccgtctcatcgaaccctctcgtcgaaatggaagcaccaagcttgatgattgggttttatgtcgaatatacaaaaagcaaacaagcgcacaaaaacaagcttacaataatctaatgacgagtggtcgtgaatacagcaacaatggttcgtcgacatcttcttcgtctcatcaatacgacgacgttctcgagtcgttgcatgagattgacaacagaagtttggggtttgccgccggttcatcaaacgcgctgcctcatagtcatagaccggttttaaccaatcataaaaccgggtttcagggtttagccagggagccaagttttgattgggcgaatttgattggacagaactcggtcccggaactcggactgagtcataacgttccgagtattcgttacggtgacggtggaacgcagcaacaaactgaggggattcctcggtttaataataactcggacgtctcggctaatcagggttttagtgttgacccggttaacggatttgggtactcgggtcaacaatctagtgggttcgggtttatttgattgtgtaatggtaacgtaataagaaaaacatatttttattttttgtccgtgtcagattagttaattaatatagcgtagaattcgaactctagggttagatttaggttctacgacttgtattgtatattcgtcgtcatttgtcctgacatttacatttttgtaaacttttatagctggaacttttgtattgatcaattatttatt

SEQ ID NO: 33562 - protein, 317 aa, Arabidopsis thaliana
  misc_feature (1)..(317): Ceres Seq. ID no. 13603448
MGLQELDPLAQLSLPPGFRFYPTDEELMVEYLCRKAAGHDFSLQLIAEIDLYKFDPWVLPSKALFGEKEWYFFSPRDRKYPNGSRPNRVAGSGYWKATGTDKVISTEGRRVGIKKALVFYIGKAPKGTKTNWIMHEYRLIEPSRRNGSTKLDDWVLCRIYKKQTSAQKQAYNNLMTSGREYSNNGSSTSSSSHQYDDVLESLHEIDNRSLGFAAGSSNALPHSHRPVLTNHKTGFQGLAREPSFDWANLIGQNSVPELGLSHNVPSIRYGDGGTQQQTEGIPRFNNNSDVSANQGFSVDPVNGFGYSGQQSSGFGFI

SEQ ID NO: 33563 - protein, 290 aa, Arabidopsis thaliana
  misc_feature (1)..(290): Ceres Seq. ID no. 13603449
MVEYLCRKAAGHDFSLQLIAEIDLYKFDPWVLPSKALFGEKEWYFFSPRDRKYPNGSRPNRVAGSGYWKATGTDKVISTEGRRVGIKKALVFYIGKAPKGTKTNWIMHEYRLIEPSRRNGSTKLDDWVLCRIYKKQTSAQKQAYNNLMTSGREYSNNGSSTSSSSHQYDDVLESLHEIDNRSLGFAAGSSNALPHSHRPVLTNHKTGFQGLAREPSFDWANLIGQNSVPELGLSHNVPSIRYGDGGTQQQTEGIPRFNNNSDVSANQGFSVDPVNGFGYSGQQSSGFGFI

SEQ ID NO: 33564 - protein, 184 aa, Arabidopsis thaliana
  misc_feature (1)..(184): Ceres Seq. ID no. 13603450
MHEYRLIEPSRRNGSTKLDDWVLCRIYKKQTSAQKQAYNNLMTSGREYSNNGSSTSSSSHQYDDVLESLHEIDNRSLGFAAGSSNALPHSHRPVLTNHKTGFQGLAREPSFDWANLIGQNSVPELGLSHNVPSIRYGDGGTQQQTEGIPRFNNNSDVSANQGFSVDPVNGFGYSGQQSSGFGFI

SEQ ID NO: 33565 - DNA, 939 bp, Arabidopsis thaliana
  misc_feature (1)..(939): Ceres Seq. ID no. 13603451
tttcataattgtatcaaattgtgagaggaaaaaaagaagttcaagaaatggagaaggaaggactcgggcttgagataacggagctgagattggggcttccggggagagatgtggcagagaagatgatgaagaagagagctttcacggagatgaatatgacgtcgtcgggtagtaatagtgatcaatgtgaaagcggcgtcgtttcatctggtggtgacgctgagaaggttaatgattcgccggcggcgaaaagccaggtggtggggtggccaccggtttgttcttaccggaagaaaaacagctgtaaggaagcttcgaccacgaaagtggggttagggtatgtgaaagtgagcatggatggtgtgccttatttgaggaagatggatcttggttcgagccaaggctatgatgatctagcctttgctcttgataagctcttcggtttccgtggcatcggtgtggccttgaaagatggtgacaactgcgaatacgttaccatatacgaagacaaagatggagactggatgctcgccggtgatgtaccttgggggatgtttctagagtcatgcaagaggttgagaataatgaaaagatcggatgctaccgggtttgggctgcagcctagaggagtagacgagtgatgatgacttgaacaagaagcaaggagctggttcattaatttaatcttaaacttgatcatcaagatcctttagaacatttttcctattcatgttatataaatatatatgttatagtatattattttgcaacaaaatttcatgttatggttttgcataattatcttcagaaagacagctatatatatatacactacttgtttcttgagtgttgagttaaaacattaatctgtttcaaaatttattgttatttcggatctatatatgtgtgtagaaacatatgtaataagtatccattatt

SEQ ID NO: 33566 - protein, 197 aa, Arabidopsis thaliana; identical to SEQ ID NO: 31845
  misc_feature (1)..(197): Ceres Seq. ID no. 13603452

SEQ ID NO: 33567 - protein, 172 aa, Arabidopsis thaliana; identical to SEQ ID NO: 31846
  misc_feature (1)..(172): Ceres Seq. ID no. 13603453

SEQ ID NO: 33568 - protein, 171 aa, Arabidopsis thaliana; identical to SEQ ID NO: 31847
  misc_feature (1)..(171): Ceres Seq. ID no. 13603454

SEQ ID NO: 33569 - DNA, 2143 bp, Arabidopsis thaliana
  misc_feature (1)..(2143): Ceres Seq. ID no. 13603455
gagccgctgagaatttggtccccttggcacgtataaaccctagcagagacattaaaccctgaaagtaattagggatcactgttctccggctccggcgaaaaaatccctcgaaatcgatcctaacctcaattgattgaaggaagttatgtattcgctttcgaggattctccaaaggagtcaaagatataactttgcaccttcttcgtttggtgcggtcagtaaattagaagtatcaagtggtggtgataaagaacgggtctttaaatcatttggattgatttatagcaaacctcaaggtttagtcagactttattccgcaagagatgtgttttcacggttctttggcatccacaagctttcttctatagctgatgctaaagataaaggagatgaggtagttagggaagaggagctgtctgaatcagaggaggcggttcctgtttctggggatgtaccagagggagttgttgatgatgattctttgttcgagcctgaacttggtagtgacaatgatgatcttgaaattgaagagaagcattcgaaagatggtgggaaaccaactaagaaaagaggtcaatctgagctgtacgaatccattgttgcttataaatcagtgaaacatgttcttgaaaaatgggtcaaagaaggaaaagatttgagtcaagctgaggttactcttgctatacacaatctgcgtaaacgcaaatcctatgctatgtgtttgcagttgtgggagtggttgggagctaatacgcagtttgagttcacagaggcaaattatgcttctcagttggatttggtggccaaggtacatagtttacaaaaagctgaaatctttttgaaagatattccagaatcttctaggggagaagtagtatacagaaccctgctggcaaattgtgtacttaagcatcatgtaaataaagctgaagacattttcaacaaaatgaaagagctaaaatttccaacaagtgtgtttgcttgcaaccagctgcttctcctctacagtatgcatgatagaaagaagataagtgatgttttgttgctaatggagagagaaaacatcaagccgagtcgtgctacctatcattttttaatcaatagtaaaggtttagccggagacataactggaatggagaagatcgtggagacaattaaggaagaaggcatcgaactagatcctgaactgcagtctattctggctaagtactacataagagcggggcttaaagaaagagcacaagaccttatgaaggagatagaagggaaaggtttgcaacaaactccatgggtgtgccggtcattactcccactttatgcagacataggagacagtgacaatgtgagaagactgagtaggtttgttgatcaaaatccgagatacgataattgcatttctgccattaaagcatggggaaagctgaaggaagtcgaagaagcagaggcagtgtttgagagacttgtggagaaatacaaaattttccctatgatgccatattttgccctcatggagatatacacagagaacaagatgctagcaaaaggcagagatctggttaaaagaatgggaaatgcagggattgcgattgggccgtcgacatggcacgcgcttgtgaagctatacatcaaagcaggagaagttggaaaagctgagttgatattgaacagagctacaaaggataataagatgagacctatgttcactacttacatggcgattcttgaagaatatgcaaaaagaggcgatgttcataacacagagaaggtattcatgaaaatgaaaagggcaagctatgcagctcagcttatgcagtatgaaaccgtgctcctggcttatatcaacgccaaaactcctgcttacgggatgattgagaggatgaaggcagacaatgtgttcccgaacaagagtctagctgcgaaactggctcaggttaatccgtttaaaaagtgtccagtgtctgttttacttgacatataacgataatcatcttatgtattgagctgttaagtgtttgttctggttgcttccaagctaggaaataataaacagaggattcgtttttcttccaaagtttctcatttttgagtttgtgttcctgtggttttttgtaagtgacataaactggaataaaattgaactgga

SEQ ID NO: 33570 - protein, 610 aa, Arabidopsis thaliana
  misc_feature (1)..(610): Ceres Seq. ID no. 13603456
MYSLSRILQRSQRYNFAPSSFGAVSKLEVSSGGDKERVFKSFGLIYSKPQGLVRLYSARDVFSRFFGIHKLSSIADAKDKGDEVVREEELSESEEAVPVSGDVPEGVVDDDSLFEPELGSDNDDLEIEEKHSKDGGKPTKKRGQSELYESIVAYKSVKHVLEKWVKEGKDLSQAEVTLAIHNLRKRKSYAMCLQLWEWLGANTQFEFTEANYASQLDLVAKVHSLQKAEIFLKDIPESSRGEVVYRTLLANCVLKHHVNKAEDIFNKMKELKFPTSVFACNQLLLLYSMHDRKKISDVLLLMERENIKPSRATYHFLINSKGLAGDITGMEKIVETIKEEGIELDPELQSILAKYYIRAGLKERAQDLMKEIEGKGLQQTPWVCRSLLPLYADIGDSDNVRRLSRFVDQNPRYDNCISAIKAWGKLKEVEEAEAVFERLVEKYKIFPMMPYFALMEIYTENKMLAKGRDLVKRMGNAGIAIGPSTWHALVKLYIKAGEVGKAELILNRATKDNKMRPMFTTYMAILEEYAKRGDVHNTEKVFMKMKRASYAAQLMQYETVLLAYINAKTPAYGMIERMKADNVFPNKSLAAKLAQVNPFKKCPVSVLLDI

SEQ ID NO: 33571 - protein, 420 aa, Arabidopsis thaliana
  misc_feature (1)..(420): Ceres Seq. ID no. 13603457
MCLQLWEWLGANTQFEFTEANYASQLDLVAKVHSLQKAEIFLKDIPESSRGEVVYRTLLANCVLKHHVNKAEDIFNKMKELKFPTSVFACNQLLLLYSMHDRKKISDVLLLMERENIKPSRATYHFLINSKGLAGDITGMEKIVETIKEEGIELDPELQSILAKYYIRAGLKERAQDLMKEIEGKGLQQTPWVCRSLLPLYADIGDSDNVRRLSRFVDQNPRYDNCISAIKAWGKLKEVEEAEAVFERLVEKYKIFPMMPYFALMEIYTENKMLAKGRDLVKRMGNAGIAIGPSTWHALVKLYIKAGEVGKAELILNRATKDNKMRPMFTTYMAILEEYAKRGDVHNTEKVFMKMKRASYAAQLMQYETVLLAYINAKTPAYGMIERMKADNVFPNKSLAAKLAQVNPFKKCPVSVLLDI

SEQ ID NO: 33572 - protein, 343 aa, Arabidopsis thaliana
  misc_feature (1)..(343): Ceres Seq. ID no. 13603458
MKELKFPTSVFACNQLLLLYSMHDRKKISDVLLLMERENIKPSRATYHFLINSKGLAGDITGMEKIVETIKEEGIELDPELQSILAKYYIRAGLKERAQDLMKEIEGKGLQQTPWVCRSLLPLYADIGDSDNVRRLSRFVDQNPRYDNCISAIKAWGKLKEVEEAEAVFERLVEKYKIFPMMPYFALMEIYTENKMLAKGRDLVKRMGNAGIAIGPSTWHALVKLYIKAGEVGKAELILNRATKDNKMRPMFTTYMAILEEYAKRGDVHNTEKVFMKMKRASYAAQLMQYETVLLAYINAKTPAYGMIERMKADNVFPNKSLAAKLAQVNPFKKCPVSVLLDI

SEQ ID NO: 33573 - DNA, 912 bp, Arabidopsis thaliana
  misc_feature (1)..(912): Ceres Seq. ID no. 13603462
tcgcatcactctttcaaagcctcgtgtcttgatttctttcaccaaactcatataatcacatatctctccaagttcatcaagaaaataatataaacacacacatacaagaactgaagaatgagcagacccggagattggaactgcaggtcatgcagccatctcaacttccagcgccgtgactcttgccagcgatgcggtgactctcgttccggccccggtggagttggtggcttagactttggtaatttcggtggcagagccatgtctgctttcggattcaccaccggctccgacgttcgtcccggtgattggtactgcaccgtgggaaactgcgggacacacaacttcgccagtcgctccacctgcttcaaatgcggcactttcaaggacgagaccggcgctggaggcggaggtggtggcatcggcggtccggccatgtttgacgccgacattatgcggtctagagtccccggtaacggtggtcgctctagctggaaatccggcgactggatttgcactaggattggttgcaatgagcataactttgcaagcagaatggaatgcttcaggtgcaatgcaccaagggacttcagcaacagaacctctttctaagttatacaaactgcttttgaagtagccttgtctccaatttcttaggcaccgtttcgatcaatggaaaggagaagcaggagcaaaagagagaattaaaagatgataattttgttagatgttgcaatgagagccaatattgtaactttagctgtcgtgcttttggatgtattatccatttttattaagatttcttttcattttctccttaattcgtaatttttcttttgcagtttctttttaagagttttattattctaatcattgtacgctgcatgtctttcttaaaagaagattctcttc

SEQ ID NO: 33574 - protein, 164 aa, Arabidopsis thaliana
  misc_feature (1)..(164): Ceres Seq. ID no. 13603463
MSRPGDWNCRSCSHLNFQRRDSCQRCGDSRSGPGGVGGLDFGNFGGRAMSAFGFTTGSDVRPGDWYCTVGNCGTHNFASRSTCFKCGTFKDETGAGGGGGGIGGPAMFDADIMRSRVPGNGGRSSWKSGDWICTRIGCNEHNFASRMECFRCNAPRDFSNRTSF

SEQ ID NO: 33575 - protein, 116 aa, Arabidopsis thaliana
  misc_feature (1)..(116): Ceres Seq. ID no. 13603464
MSAFGFTTGSDVRPGDWYCTVGNCGTHNFASRSTCFKCGTFKDETGAGGGGGGIGGPAMFDADIMRSRVPGNGGRSSWKSGDWICTRIGCNEHNFASRMECFRCNAPRDFSNRTSF

SEQ ID NO: 33576 - DNA, 1806 bp, Arabidopsis thaliana
  misc_feature (1)..(1806): Ceres Seq. ID no. 13603467
atgagcgatttcattttgatctccgacggcgaggatgaagctactccaccaccgtcgaagagggctcgaaagaatcgtacacccacggatttgaacttggataccgaaccatcactgcagaagcaaccgccaggatctgcttctactccgtttttcctcgacgagacacctctctctgacgatgtcactgtcctaaagtcttcctttggttccggaaccggagcttcttcaggccgcgagaacaattttttcggtaaacgagttatatctcttgaatcggattctgaagacagtcctggacctgagagttcaaaaaagtatgaacctgtttatactgattcttggaagaaaccttgtagattggaatttggatccagtgatgctaattctgatgatgatcctagttggatgcggagagctagttttcaatcttcgctgtctaaagatgctattgaggtattgctggtagattctgaccatgagaaagaagatacaggcgttgagaagatgggtcgaaaaaagcagaccataacttctaaaagtacatctctttctgctgattcattgcctaaaaagaagatgtcaaaagatgaaaaaacccgcgcggcagaggaaaagaagttacaaaaagaacaagaaaaattacagaaagctgcctcgaaagcagaagatgctgagcataaaaagttggagagggaaaagcagaaatgggcaaaggaaaaggataaagcacttaaatgtattgttgcctggattgacaataaagtgcttgaaggatcttttggaggacttctcatttcgggattgaaagagaaatgtattacataccatgtcaccactaatccgattcagagatccattgtgtggacaatgacacttccagaagatattgctcagtcattgcctctagggtccaagattccatatgttttactcttgtatgaggctgaagacttttgtaatcttgttgctaagaaagaacttctagaaaacgtctacagagttcgtgacgaatacccatcttatacaatgtgctacctcaccaataagttactgtcctacgtaaacaaaaaggaaagggttgagtacaaggaccctgtaaatggctgtggttggagaaagcctcctattgatgaggcaattgcgaagttatcaactcactatattggagtacattcccggcattgtgtagacgaggctgaggtggctgaccatgttgttcggttaacaagtagtctggcccattgccaagtcaggaagaagttaactcggttatcagtatacgctgatggtacattaatgtccaagaatgcagctgataagcacttgattagagagagcatatggttgaaagtgttggtagcaataccaaaggtacagccaagatacgctatagcagtgtcaaagaaatacccatccttgaagtcacttcttaaggtttatatggatcctaacatatcggttcatgagaaggagtttctactgaaagacttgaaagtggaaaatttagtaggaagagacacaagtgtaggtgaggcctgttcgaagcggatatacagagtgcttatgtctttagatggaaccattaagactgatgacgtcgaaaatggtgctgcttccttcacacttcctccatctgacttaatttagaactagagagaacatcaaataggtttttaactttctatgtcaaacaaaacagaagaatgattgtgtctgagatttttttttgtataagcatgcaaagttcattatgtctgtttgaagtctttaatgtgtgtagtcctgactcgtcttctaaagagt

SEQ ID NO: 33577 - protein, 549 aa, Arabidopsis thaliana
  misc_feature (1)..(549): Ceres Seq. ID no. 13603468
MSDFILISDGEDEATPPPSKRARKNRTPTDLNLDTEPSLQKQPPGSASTPFFLDETPLSDDVTVLKSSFGSGTGASSGRENNFFGKRVISLESDSEDSPGPESSKKYEPVYTDSWKKPCRLEFGSSDANSDDDPSWMRRASFQSSLSKDAIEVLLVDSDHEKEDTGVEKMGRKKQTITSKSTSLSADSLPKKKMSKDEKTRAAEEKKLQKEQEKLQKAASKAEDAEHKKLEREKQKWAKEKDKALKCIVAWIDNKVLEGSFGGLLISGLKEKCITYHVTTNPIQRSIVWTMTLPEDIAQSLPLGSKIPYVLLLYEAEDFCNLVAKKELLENVYRVRDEYPSYTMCYLTNKLLSYVNKKERVEYKDPVNGCGWRKPPIDEAIAKLSTHYIGVHSRHCVDEAEVADHVVRLTSSLAHCQVRKKLTRLSVYADGTLMSKNAADKHLIRESIWLKVLVAIPKVQPRYAIAVSKKYPSLKSLLKVYMDPNISVHEKEFLLKDLKVENLVGRDTSVGEACSKRIYRVLMSLDGTIKTDDVENGAASFTLPPSDLI

SEQ ID NO: 33578 - protein, 413 aa, Arabidopsis thaliana
  misc_feature (1)..(413): Ceres Seq. ID no. 13603469
MRRASFQSSLSKDAIEVLLVDSDHEKEDTGVEKMGRKKQTITSKSTSLSADSLPKKKMSKDEKTRAAEEKKLQKEQEKLQKAASKAEDAEHKKLEREKQKWAKEKDKALKCIVAWIDNKVLEGSFGGLLISGLKEKCITYHVTTNPIQRSIVWTMTLPEDIAQSLPLGSKIPYVLLLYEAEDFCNLVAKKELLENVYRVRDEYPSYTMCYLTNKLLSYVNKKERVEYKDPVNGCGWRKPPIDEAIAKLSTHYIGVHSRHCVDEAEVADHVVRLTSSLAHCQVRKKLTRLSVYADGTLMSKNAADKHLIRESIWLKVLVAIPKVQPRYAIAVSKKYPSLKSLLKVYMDPNISVHEKEFLLKDLKVENLVGRDTSVGEACSKRIYRVLMSLDGTIKTDDVENGAASFTLPPSDLI

SEQ ID NO: 33579 - protein, 380 aa, Arabidopsis thaliana
  misc_feature (1)..(380): Ceres Seq. ID no. 13603470
MGRKKQTITSKSTSLSADSLPKKKMSKDEKTRAAEEKKLQKEQEKLQKAASKAEDAEHKKLEREKQKWAKEKDKALKCIVAWIDNKVLEGSFGGLLISGLKEKCITYHVTTNPIQRSIVWTMTLPEDIAQSLPLGSKIPYVLLLYEAEDFCNLVAKKELLENVYRVRDEYPSYTMCYLTNKLLSYVNKKERVEYKDPVNGCGWRKPPIDEAIAKLSTHYIGVHSRHCVDEAEVADHVVRLTSSLAHCQVRKKLTRLSVYADGTLMSKNAADKHLIRESIWLKVLVAIPKVQPRYAIAVSKKYPSLKSLLKVYMDPNISVHEKEFLLKDLKVENLVGRDTSVGEACSKRIYRVLMSLDGTIKTDDVENGAASFTLPPSDLI

SEQ ID NO: 33580 - DNA, 1138 bp, Arabidopsis thaliana
  misc_feature (1)..(1138): Ceres Seq. ID no. 13603491
atgtcctcttcgctccattgctcggaatcacagaaaaaggtgagattaaggaggagcgaaacatgacgaatccacttaattccaccgccgctaatcgctctaaccagccgtcttctgatggaatcagcgacggtcaaatcaccaatgaggaagctgaatcactaattaacaagaagaactgttcagggcacaagctaaaagaagtaactgatagtgacacattctctgacaatggtaaagatgattcagataccaagaaaagattccattaccatcaggatcagcggaggatgagtttgacatcgattgtggcggtggagtctccttcatcgagcaacgctccctctagaaaaaccattgatcttggccatggaagcgacctcatttacattcagaggtttcttccatttcaacaatcttggactttcttcgattatctcgacaagcatattccttggaccaggcctactattcgtgtctttggtcgatcttgcctccagccgagagatacttgttatgttgcaagtagcggattgactgcgttggtgtacagtggatatcgacctacctcctattcgtgggatgatttcccacctctcaaggagattctggatgctatttacaaggtgcttcctggaagcagattcaacagcttgctcttaaatagatacaaaggtgccagtgattatgtggcttggcatgcagatgatgaaaagatttatggtccaactccagaaattgcttcagtctcgtttggatgtgaacgtgattttgtgttgaagaaaaagaaagatgaagaatcttcccaagggaaaacaggagacagtggaccagctaagaagaggttaaagagaagcagcagagaggatcaacaaagtttgacattgaaacatggatcgttgctggtgatgagaggatacactcaaagagactggattcattctgtgccaaagcgtgcaaaggcagagggcactcgtatcaacctcacattcaggcttgttttgtaaattgagcatcatatgcaagaaggtgggcttgatcttggtctccattgacatattctaagcttctcatcttaattctctataaacatcaattggtgtagacatttcaagaagcaaattggacgggaagattg

SEQ ID NO: 33581 - protein, 334 aa, Arabidopsis thaliana
  misc_feature (1)..(334): Ceres Seq. ID no. 13603492
VLFAPLLGITEKGEIKEERNMTNPLNSTAANRSNQPSSDGISDGQITNEEAESLINKKNCSGHKLKEVTDSDTFSDNGKDDSDTKKRFHYHQDQRRMSLTSIVAVESPSSSNAPSRKTIDLGHGSDLIYIQRFLPFQQSWTFFDYLDKHIPWTRPTIRVFGRSCLQPRDTCYVASSGLTALVYSGYRPTSYSWDDFPPLKEILDAIYKVLPGSRFNSLLLNRYKGASDYVAWHADDEKIYGPTPEIASVSFGCERDFVLKKKKDEESSQGKTGDSGPAKKRLKRSSREDQQSLTLKHGSLLVMRGYTQRDWIHSVPKRAKAEGTRINLTFRLVL

SEQ ID NO: 33582 - protein, 314 aa, Arabidopsis thaliana
  misc_feature (1)..(314): Ceres Seq. ID no. 13603493
MTNPLNSTAANRSNQPSSDGISDGQITNEEAESLINKKNCSGHKLKEVTDSDTFSDNGKDDSDTKKRFHYHQDQRRMSLTSIVAVESPSSSNAPSRKTIDLGHGSDLIYIQRFLPFQQSWTFFDYLDKHIPWTRPTIRVFGRSCLQPRDTCYVASSGLTALVYSGYRPTSYSWDDFPPLKEILDAIYKVLPGSRFNSLLLNRYKGASDYVAWHADDEKIYGPTPEIASVSFGCERDFVLKKKKDEESSQGKTGDSGPAKKRLKRSSREDQQSLTLKHGSLLVMRGYTQRDWIHSVPKRAKAEGTRINLTFRLVL

SEQ ID NO: 33583 - protein, 238 aa, Arabidopsis thaliana
  misc_feature (1)..(238): Ceres Seq. ID no. 13603494
MSLTSIVAVESPSSSNAPSRKTIDLGHGSDLIYIQRFLPFQQSWTFFDYLDKHIPWTRPTIRVFGRSCLQPRDTCYVASSGLTALVYSGYRPTSYSWDDFPPLKEILDAIYKVLPGSRFNSLLLNRYKGASDYVAWHADDEKIYGPTPEIASVSFGCERDFVLKKKKDEESSQGKTGDSGPAKKRLKRSSREDQQSLTLKHGSLLVMRGYTQRDWIHSVPKRAKAEGTRINLTFRLVL

SEQ ID NO: 33584 - DNA, 3237 bp, Arabidopsis thaliana
  misc_feature (1)..(3237): Ceres Seq. ID no. 13603499
atggcggaagcaagacgattcagcccagttcatgaattagatgttggacaaatactctcagaagcacgacatcgatggcttcgtcctcctgaaatctgtgaaattttacagaattaccaaagatttcaaatttctactgagccacctactacaccatcaagtgggtctgtttttatgtttgatcgaaaggtgctcagatacttcaggaaagacggtcacaattggaggaagaaaaaagatggaaagactgtgaaggaagctcatgagaggttgaaggcgggaagcgttgatgttctacattgttactatgcgcatggacaggacaatgaaaactttcaaagacgcagttactggttgcttcaggaagaactttcccacatagtttttgttcactacctcgaagttaagggtagtagagtttctacttcttttaaccggatgcaaaggactgaagacgcggctcggtctcctcaagaaactggggacgccttgaccagtgaacatgatggttatgcttcttgcagcttcaatcaaaatgatcatagcaatcattcacaaactactgactcagcaagtgtcaatggttttcactctccagaacttgaagatgctgaatcagcatacaatcagcatggaagttccacagcttactctcatcaagaacttcagcagcctgcaacaggaggaaaccttactggttttgatccttactatcaaatctctttgacgcccagggatagttatcaaaaagagcttcgcacaatccccgtaactgattcttcaattatggtagacaaaagcaaaactatcaacagtcctggagtaacaaatgggttaaaaaacagaaaatccattgattcccaaacctgggaagagattctgggaaattgtggttctggagttgaagccttacctttgcagcctaacagtgagcatgaagtgctggaccaaatactcgaaagctcttttacaatgcaagattttgctagtctacaagagtccatggtcaaaagccagaatcaggagttaaattcaggacttacatctgatcgtaccgtgtggttccaaggacaagatatggagctaaatgctataagcaatctagcttcgaatgaaaaagctccatatctatctacgatgaaacaacatctgttacacggtgcattgggcgaagaaggtctgaaaaagatggacagtttcaatcgctggatgagcaaagaacttggagatgttggtgttatagctgatgcaaacgagtcctttactcaatcaagttcaagaacctactgggaagaagttgagagtgaggatgggtccaatggtcacaactctaggagggacatggatggatatgttatgagtccttccctctcaaaggaacagctctttagcatcaatgacttctctccaagctgggcttatgtgggttgtgaagtggtggtttttgtcactggaaaattcttaaagactcgggaggagactgaaattggcgagtggtcttgcatgtttgggcaaacagaagttccagcagatgttatatctaatggtattctccaatgtgttgctcctatgcatgaggctggaagagttcccttttatgtaacatgttccaacagattggcatgcagtgaagtgcgtgaattcgagtataaggttgccgagtctcaagtttttgatagagaagcagatgatgagtctactattgacattcttgaggcaagatttgttaaactgttgtgctcgaaatctgaaaatacaagccctgtttctgggaatgacagtgatttgtcacaattgagcgagaagattagtttactacttttcgagaacgatgaccagttggatcagatgctcatgaatgaaatctcccaagaaaatatgaaaaacaaccttttgcaggaatttctgaaagaaagcttacactcatggcttttacaaaagatagcagaaggtggaaaaggtccaagtgttttggatgaaggtggccaaggtgtattacattttgcagcttctcttggttacaactgggccttagaaccaacaataatcgctggtgtaagcgttgattttcgcgatgtaaatggttggaccgcacttcattgggcagctttctttggcagggagaggataattggttcactcatagctcttggtgctgctcctggaactttaactgacccaaatccagatttcccatcaggaagcacaccttctgatctagcctatgctaatggtcacaaaggaattgctggttatctctcagaatatgccttaagagctcatgtttctttgctcagtctaaatgataaaaatgccgaaactgttgagatggctcctagcccatccagctcatcattgacagactcgttgacagctgtacgtaacgctactcaggcagcagctcggattcatcaggttttcagggctcagtctttccagaagaagcaactaaaagaatttggagataaaaagcttggaatgtcggaggagcgtgctctttcgatgcttgctcctaaaacacacaaatcaggaagggcacatagtgatgattccgtgcaagccgctgctattcggattcagaacaagttccgaggttacaagggaagaaaagactatttgattaccagacaaagaatcatcaaaatacaggctcatgtgagaggttatcagtttaggaaaaactacagaaagataatttggtcagtgggggtattagagaaggtgatattacgttggagacggaaaggagctggtttgcgcgggtttaagtcagaagcacttgttgagaagatgcaagacggaacagagaaagaagaagatgatgattttttcaaacaaggaagaaagcaaacagaggataggctacaaaaagctcttgcaagagtgaaatccatggttcaatatcctgaagctagagatcaataccgtagattgctaaatgttgtcaacgacatccaagaaagcaaggttgaaaaagctcttgaaaattcagaagcaacttgttttgatgatgatgatgatctgatagatattgaagcattgttggaagatgatgacacattgatgttgcctatgtcctcatctttgtggaccagttaaatcactctcaagctttgttgtgatattgtgtcacagtattattgactcattaaacttgtaaattcttgtgtaatcactcttctcatatactgtaactgcattcatgactctaatttaaatgatatatatttgaaacat

SEQ ID NO: 33585 - protein, 1032 aa, Arabidopsis thaliana
  misc_feature (1)..(1032): Ceres Seq. ID no. 13603500
MAEARRFSPVHELDVGQILSEARHRWLRPPEICEILQNYQRFQISTEPPTTPSSGSVFMFDRKVLRYFRKDGHNWRKKKDGKTVKEAHERLKAGSVDVLHCYYAHGQDNENFQRRSYWLLQEELSHIVFVHYLEVKGSRVSTSFNRMQRTEDAARSPQETGDALTSEHDGYASCSFNQNDHSNHSQTTDSASVNGFHSPELEDAESAYNQHGSSTAYSHQELQQPATGGNLTGFDPYYQISLTPRDSYQKELRTIPVTDSSIMVDKSKTINSPGVTNGLKNRKSIDSQTWEEILGNCGSGVEALPLQPNSEHEVLDQILESSFTMQDFASLQESMVKSQNQELNSGLTSDRTVWFQGQDMELNAISNLASNEKAPYLSTMKQHLLHGALGEEGLKKMDSFNRWMSKELGDVGVIADANESFTQSSSRTYWEEVESEDGSNGHNSRRDMDGYVMSPSLSKEQLFSINDFSPSWAYVGCEVVVFVTGKFLKTREETEIGEWSCMFGQTEVPADVISNGILQCVAPMHEAGRVPFYVTCSNRLACSEVREFEYKVAESQVFDREADDESTIDILEARFVKLLCSKSENTSPVSGNDSDLSQLSEKISLLLFENDDQLDQMLMNEISQENMKNNLLQEFLKESLHSWLLQKIAEGGKGPSVLDEGGQGVLHFAASLGYNWALEPTIIAGVSVDFRDVNGWTALHWAAFFGRERIIGSLIALGAAPGTLTDPNPDFPSGSTPSDLAYANGHKGIAGYLSEYALRAHVSLLSLNDKNAETVEMAPSPSSSSLTDSLTAVRNATQAAARIHQVFRAQSFQKKQLKEFGDKKLGMSEERALSMLAPKTHKSGRAHSDDSVQAAAIRIQNKFRGYKGRKDYLITRQRIIKIQAHVRGYQFRKNYRKIIWSVGVLEKVILRWRRKGAGLRGFKSEALVEKMQDGTEKEEDDDFFKQGRKQTEDRLQKALARVKSMVQYPEARDQYRRLLNVVNDIQESKVEKALENSEATCFDDDDDLIDIEALLEDDDTLMLPMSSSLWTS

SEQ ID NO: 33586 - protein, 974 aa, Arabidopsis thaliana
  misc_feature (1)..(974): Ceres Seq. ID no. 13603501
MFDRKVLRYFRKDGHNWRKKKDGKTVKEAHERLKAGSVDVLHCYYAHGQDNENFQRRSYWLLQEELSHIVFVHYLEVKGSRVSTSFNRMQRTEDAARSPQETGDALTSEHDGYASCSFNQNDHSNHSQTTDSASVNGFHSPELEDAESAYNQHGSSTAYSHQELQQPATGGNLTGFDPYYQISLTPRDSYQKELRTIPVTDSSIMVDKSKTINSPGVTNGLKNRKSIDSQTWEEILGNCGSGVEALPLQPNSEHEVLDQILESSFTMQDFASLQESMVKSQNQELNSGLTSDRTVWFQGQDMELNAISNLASNEKAPYLSTMKQHLLHGALGEEGLKKMDSFNRWMSKELGDVGVIADANESFTQSSSRTYWEEVESEDGSNGHNSRRDMDGYVMSPSLSKEQLFSINDFSPSWAYVGCEVVVFVTGKFLKTREETEIGEWSCMFGQTEVPADVISNGILQCVAPMHEAGRVPFYVTCSNRLACSEVREFEYKVAESQVFDREADDESTIDILEARFVKLLCSKSENTSPVSGNDSDLSQLSEKISLLLFENDDQLDQMLMNEISQENMKNNLLQEFLKESLHSWLLQKIAEGGKGPSVLDEGGQGVLHFAASLGYNWALEPTIIAGVSVDFRDVNGWTALHWAAFFGRERIIGSLIALGAAPGTLTDPNPDFPSGSTPSDLAYANGHKGIAGYLSEYALRAHVSLLSLNDKNAETVEMAPSPSSSSLTDSLTAVRNATQAAARIHQVFRAQSFQKKQLKEFGDKKLGMSEERALSMLAPKTHKSGRAHSDDSVQAAAIRIQNKFRGYKGRKDYLITRQRIIKIQAHVRGYQFRKNYRKIIWSVGVLEKVILRWRRKGAGLRGFKSEALVEKMQDGTEKEEDDDFFKQGRKQTEDRLQKALARVKSMVQYPEARDQYRRLLNVVNDIQESKVEKALENSEATCFDDDDDLIDIEALLEDDDTLMLPMSSSLWTS

SEQ ID NO: 33587 - protein, 886 aa, Arabidopsis thaliana
  misc_feature (1)..(886): Ceres Seq. ID no. 13603502
MQRTEDAARSPQETGDALTSEHDGYASCSFNQNDHSNHSQTTDSASVNGFHSPELEDAESAYNQHGSSTAYSHQELQQPATGGNLTGFDPYYQISLTPRDSYQKELRTIPVTDSSIMVDKSKTINSPGVTNGLKNRKSIDSQTWEEILGNCGSGVEALPLQPNSEHEVLDQILESSFTMQDFASLQESMVKSQNQELNSGLTSDRTVWFQGQDMELNAISNLASNEKAPYLSTMKQHLLHGALGEEGLKKMDSFNRWMSKELGDVGVIADANESFTQSSSRTYWEEVESEDGSNGHNSRRDMDGYVMSPSLSKEQLFSINDFSPSWAYVGCEVVVFVTGKFLKTREETEIGEWSCMFGQTEVPADVISNGILQCVAPMHEAGRVPFYVTCSNRLACSEVREFEYKVAESQVFDREADDESTIDILEARFVKLLCSKSENTSPVSGNDSDLSQLSEKISLLLFENDDQLDQMLMNEISQENMKNNLLQEFLKESLHSWLLQKIAEGGKGPSVLDEGGQGVLHFAASLGYNWALEPTIIAGVSVDFRDVNGWTALHWAAFFGRERIIGSLIALGAAPGTLTDPNPDFPSGSTPSDLAYANGHKGIAGYLSEYALRAHVSLLSLNDKNAETVEMAPSPSSSSLTDSLTAVRNATQAAARIHQVFRAQSFQKKQLKEFGDKKLGMSEERALSMLAPKTHKSGRAHSDDSVQAAAIRIQNKFRGYKGRKDYLITRQRIIKIQAHVRGYQFRKNYRKIIWSVGVLEKVILRWRRKGAGLRGFKSEALVEKMQDGTEKEEDDDFFKQGRKQTEDRLQKALARVKSMVQYPEARDQYRRLLNVVNDIQESKVEKALENSEATCFDDDDDLIDIEALLEDDDTLMLPMSSSLWTS

SEQ ID NO: 33588 - DNA, 1140 bp, Arabidopsis thaliana
  misc_feature (1)..(1140): Ceres Seq. ID no. 13603511
tataaacacaaaagcctttagtatcattctcgaaaaccaccaaaaacctctttataacccaacaaacaaagtctctacttcttcttcaatcactgaaacacaacaccaaaaaagaaaaaagtatgtctcttcttccccatctcatcctctacctaacacttttgacggtggttgttactggagaaactctccgaccaagattctacagcgagacatgccctgaagctgaatccatagtaagaagagaaatgaagaaagcaatgatcaaagaagcaagaagcgtcgcttccgtcatgcgtttccaatttcacgactgtttcgtcaatggatgtgacgcatctctgttgcttgacgacacaccaaacatgcttggtgaaaaactatcactttccaacatcgattcactaagatctttcgaagtcgttgacgacattaaagaagctctagagaaagcttgtccagctactgtttcttgtgccgatatcgttatcatggccgctcgtgacgccgttgctcttacaggaggaccagattgggaagtgaagctagggaggaaagacagtttaacagcgagtcagcaagattccgacgatataatgccaagtccaagagccaacgcaactttcttgattgatctcttcgaaagattcaatctttctgtaaaagacatggttgctttatcagggtcacactcaataggtcaaggtcggtgtttttcaatcatgttcagactttataaccaatccggttctggtaaaccggatccagctcttgaaccgagttaccgtaagaagcttgataagctttgtcctttgggtggagatgagaatgtgactggagatctagatgcaacacctcaggtttttgataatcagtatttcaaagacttggtttcagggagagggtttcttaactctgatcagactttgtacacgaatctagtgacgagagagtatgtgaagatgtttagtgaggatcaagatgagttctttagggcttttgcagaaggcatggtgaagttgggtgatttgcaatctgggagacctggtgagattaggtttaattgtagagttgttaatagaaggcctattgatgtattgcttgtatcttgaattatcattagtaaagagaagaaatctt

SEQ ID NO: 33589 - protein, 329 aa, Arabidopsis thaliana
  misc_feature (1)..(329): Ceres Seq. ID no. 13603512
MSLLPHLILYLTLLTVVVTGETLRPRFYSETCPEAESIVRREMKKAMIKEARSVASVMRFQFHDCFVNGCDASLLLDDTPNMLGEKLSLSNIDSLRSFEVVDDIKEALEKACPATVSCADIVIMAARDAVALTGGPDWEVKLGRKDSLTASQQDSDDIMPSPRANATFLIDLFERFNLSVKDMVALSGSHSIGQGRCFSIMFRLYNQSGSGKPDPALEPSYRKKLDKLCPLGGDENVTGDLDATPQVFDNQYFKDLVSGRGFLNSDQTLYTNLVTREYVKMFSEDQDEFFRAFAEGMVKLGDLQSGRPGEIRFNCRVVNRRPIDVLLVS

SEQ ID NO: 33590 - protein, 287 aa, Arabidopsis thaliana
  misc_feature (1)..(287): Ceres Seq. ID no. 13603513
MKKAMIKEARSVASVMRFQFHDCFVNGCDASLLLDDTPNMLGEKLSLSNIDSLRSFEVVDDIKEALEKACPATVSCADIVIMAARDAVALTGGPDWEVKLGRKDSLTASQQDSDDIMPSPRANATFLIDLFERFNLSVKDMVALSGSHSIGQGRCFSIMFRLYNQSGSGKPDPALEPSYRKKLDKLCPLGGDENVTGDLDATPQVFDNQYFKDLVSGRGFLNSDQTLYTNLVTREYVKMFSEDQDEFFRAFAEGMVKLGDLQSGRPGEIRFNCRVVNRRPIDVLLVS

SEQ ID NO: 33591 - protein, 283 aa, Arabidopsis thaliana
  misc_feature (1)..(283): Ceres Seq. ID no. 13603514
MIKEARSVASVMRFQFHDCFVNGCDASLLLDDTPNMLGEKLSLSNIDSLRSFEVVDDIKEALEKACPATVSCADIVIMAARDAVALTGGPDWEVKLGRKDSLTASQQDSDDIMPSPRANATFLIDLFERFNLSVKDMVALSGSHSIGQGRCFSIMFRLYNQSGSGKPDPALEPSYRKKLDKLCPLGGDENVTGDLDATPQVFDNQYFKDLVSGRGFLNSDQTLYTNLVTREYVKMFSEDQDEFFRAFAEGMVKLGDLQSGRPGEIRFNCRVVNRRPIDVLLVS

SEQ ID NO: 33592 - DNA, 1215 bp, Arabidopsis thaliana
  misc_feature (1)..(1215): Ceres Seq. ID no. 13603523
aaagggaacgataccattagtcccaataccaatccttgcaaaattcaaactcaaacaaaccgtttatctcacgcgccgccgtactcgccacgatccgtctttggagaccaatttatggagccgccgaagggagataccgtagtgaagactgaggtcccggtgaaggatccatcgctaagcgtcgtcgattcgaaaacgaagggagtcgaggatgcgaacactgagatagccttgtccgatgaggttgaaatcgagacgaagggaagcgattcgacaccggtgaaagctccgagtcgaacatcgtctggatcgaagaaatctgtacattggagccccgaattggtgtctggatctcaggaaccggatcagaaagctgcatcgtcttcttcggctggatctaatccgtatattgctcgttctccagctgagacttcagatgcttcgttgaaagatacgatggagactgtgaaaggagtgcttggtagatggggaaagagggttgcagaagcagcaaagaagacggagagccttgccgggaacacatggcaacacctgagaactgctccgagttttgcggatgctgcaatgggaagaattgcacagagtacaaaggtctttgcagaaggaggatatgagaagatattccgacaaacctttgagacagatcccgaagaacagttgctaaattcttttgcatgttacttgtcaacatcagctggcccagttatgggagttctatatatatccagtgccaaacttgcttactgtagtgacaaccctctctcctataaaaacggtgatcaaaccgaatggagctattacaaggtagtaattccattacatcaacttaaagcagtgaatccatcagcgagcatagtcaatcctgcagagaagtacatacaggtgatttcggtagacaatcatgagttttggttcatgggttttttaaactacgacggcgctgtcacgtctctgcaagattctttgcaagccggtgctttaaggtcggtgtgatacataactggatgactgatgaccataaaagcatgttgatctccacctcttcttgcttagtcatatcagaagactcaaatttttacattattttgcatttaatctcaatatcctatttactacagaaactagctgaattttacaaatttactttaaaatgttttatcttttgatatttttatgagaagacagcttaattgc

SEQ ID NO: 33593 - protein, 337 aa, Arabidopsis thaliana
  misc_feature (1)..(337): Ceres Seq. ID no. 13603524
KGNDTISPNTNPCKIQTQTNRLSHAPPYSPRSVFGDQFMEPPKGDTVVKTEVPVKDPSLSVVDSKTKGVEDANTEIALSDEVEIETKGSDSTPVKAPSRTSSGSKKSVHWSPELVSGSQEPDQKAASSSSAGSNPYIARSPAETSDASLKDTMETVKGVLGRWGKRVAEAAKKTESLAGNTWQHLRTAPSFADAAMGRIAQSTKVFAEGGYEKIFRQTFETDPEEQLLNSFACYLSTSAGPVMGVLYISSAKLAYCSDNPLSYKNGDQTEWSYYKVVIPLHQLKAVNPSASIVNPAEKYIQVISVDNHEFWFMGFLNYDGAVTSLQDSLQAGALRSV

SEQ ID NO: 33594 - protein, 299 aa, Arabidopsis thaliana
  misc_feature (1)..(299): Ceres Seq. ID no. 13603525
MEPPKGDTVVKTEVPVKDPSLSVVDSKTKGVEDANTEIALSDEVEIETKGSDSTPVKAPSRTSSGSKKSVHWSPELVSGSQEPDQKAASSSSAGSNPYIARSPAETSDASLKDTMETVKGVLGRWGKRVAEAAKKTESLAGNTWQHLRTAPSFADAAMGRIAQSTKVFAEGGYEKIFRQTFETDPEEQLLNSFACYLSTSAGPVMGVLYISSAKLAYCSDNPLSYKNGDQTEWSYYKVVIPLHQLKAVNPSASIVNPAEKYIQVISVDNHEFWFMGFLNYDGAVTSLQDSLQAGALRSV

SEQ ID NO: 33595 - protein, 185 aa, Arabidopsis thaliana
  misc_feature (1)..(185): Ceres Seq. ID no. 13603526
METVKGVLGRWGKRVAEAAKKTESLAGNTWQHLRTAPSFADAAMGRIAQSTKVFAEGGYEKIFRQTFETDPEEQLLNSFACYLSTSAGPVMGVLYISSAKLAYCSDNPLSYKNGDQTEWSYYKVVIPLHQLKAVNPSASIVNPAEKYIQVISVDNHEFWFMGFLNYDGAVTSLQDSLQAGALRSV

SEQ ID NO: 33596 - DNA, 1413 bp, Arabidopsis thaliana
  misc_feature (1)..(1413): Ceres Seq. ID no. 13603527
aatctcaccttctctctccctctctataacaaacattaatacacacaccaaaaaaaaacctgtttatgtctcaaagatctctgattcctcattcttcttctatagcttttggtctccattctcatctcttaatctccagtgagatcagctccaattctaactggtctctctaaataaaaaacagaaataaaaatccaacctttttcaattttcgttcaattttcccggaaaaaaaagcgatccttttgatttttcgatttctccaagtaacaattcaaaatgggtctaaagggttttgctgaaggaggaatagcttcgattgttgcgggttgttcgacccacccgcttgatctaatcaaggtccgaatgcaacttcaaggcgaatcagctccgattcaaaccaatctccgaccagctcttgcttttcagacttcgaccaccgtcaacgcgcctcctctacgtgttggtgtaatcggagtcggatctcgtttaataagagaagaaggcatgcgtgctctgttttccggcgtctccgccaccgttcttcgtcaaactctgtattcaacgactcgtatgggtttatacgacatcatcaaaggagaatggaccgacccggaaacaaaaacgatgcctttaatgaaaaaaatcggtgccggagccatcgccggagcaatcggagccgccgttgggaatcctgctgacgtggcgatggtgaggatgcaagccgatggtcgtttaccgttgactgatagaagaaactacaaaagcgttttagacgcgatcacgcaaatgattcgcggtgaaggcgttacgtcgttgtggagaggatcgtctttgacgataaacagagcaatgcttgtgacgtcatcgcagttggcttcgtatgattctgttaaagagacgattttggagaaagggttgttgaaagatgggcttgggactcatgtgtcggcgagtttcgcggcggggtttgttgcgagcgttgcgagtaatcctgttgatgtgattaagacgagagtgatgaatatgaaggtggtggctggagttgctccgccgtataaaggagcggttgattgtgctttgaaaacggtgaaagcggaagggattatgtctttgtataaaggttttatcccgacggtttcgagacaagcaccgttcacggtggttttgtttgttacgcttgaacaagttaagaagttgttcaaggactatgacttttgaaaaaaacaagagttgaattatgttgaagaagatgaatgatggtggcgacaataagcttctctttttttctggttataattttcttttgattatttgagtagttttaaattgtttcccatttgttggaatagatctatgatatgataattcttctcatggagaagaaagaaagaaagaaacagttcatttgat

SEQ ID NO: 33597 - protein, 313 aa, Arabidopsis thaliana
  misc_feature (1)..(313): Ceres Seq. ID no. 13603528
MGLKGFAEGGIASIVAGCSTHPLDLIKVRMQLQGESAPIQTNLRPALAFQTSTTVNAPPLRVGVIGVGSRLIREEGMRALFSGVSATVLRQTLYSTTRMGLYDIIKGEWTDPETKTMPLMKKIGAGAIAGAIGAAVGNPADVAMVRMQADGRLPLTDRRNYKSVLDAITQMIRGEGVTSLWRGSSLTINRAMLVTSSQLASYDSVKETILEKGLLKDGLGTHVSASFAAGFVASVASNPVDVIKTRVMNMKVVAGVAPPYKGAVDCALKTVKAEGIMSLYKGFIPTVSRQAPFTVVLFVTLEQVKKLFKDYDF

SEQ ID NO: 33598 - protein, 284 aa, Arabidopsis thaliana
  misc_feature (1)..(284): Ceres Seq. ID no. 13603529
MQLQGESAPIQTNLRPALAFQTSTTVNAPPLRVGVIGVGSRLIREEGMRALFSGVSATVLRQTLYSTTRMGLYDIIKGEWTDPETKTMPLMKKIGAGAIAGAIGAAVGNPADVAMVRMQADGRLPLTDRRNYKSVLDAITQMIRGEGVTSLWRGSSLTINRAMLVTSSQLASYDSVKETILEKGLLKDGLGTHVSASFAAGFVASVASNPVDVIKTRVMNMKVVAGVAPPYKGAVDCALKTVKAEGIMSLYKGFIPTVSRQAPFTVVLFVTLEQVKKLFKDYDF

SEQ ID NO: 33599 - protein, 237 aa, Arabidopsis thaliana
  misc_feature (1)..(237): Ceres Seq. ID no. 13603530
MRALFSGVSATVLRQTLYSTTRMGLYDIIKGEWTDPETKTMPLMKKIGAGAIAGAIGAAVGNPADVAMVRMQADGRLPLTDRRNYKSVLDAITQMIRGEGVTSLWRGSSLTINRAMLVTSSQLASYDSVKETILEKGLLKDGLGTHVSASFAAGFVASVASNPVDVIKTRVMNMKVVAGVAPPYKGAVDCALKTVKAEGIMSLYKGFIPTVSRQAPFTVVLFVTLEQVKKLFKDYDF

SEQ ID NO: 33600 - DNA, 1537 bp, Arabidopsis thaliana
  misc_feature (1)..(1537): Ceres Seq. ID no. 13603535
atcatcaaagtgaaaatgacaaacttcaaagacaacgatggagatggaaccaaactccacgtggtaatgtttccatggttagcctttggtcacatggttccatacttggagctctctaaactcatagctcaaaagggtcacaaagtctctttcatttccactccacgtaacatcgaccgtctcctcccatggttaccggaaaatctctcctccgtcattaacttcgtcaagctatcacttcccgtcggcgacaacaaactcccggaagacggtgaagctaccacagacgtccctttcgaactcataccttacttaaaaatcgcttacgacgggttaaaagttccggtgacggagtttcttgaatcttcgaaacccgattgggttcttcaagatttcgcggggttttggcttcctccaatctctcgtcgtctcggaatcaaaaccggattctttagcgctttcaacggcgcgacgctcggtattcttaaaccgccggggttcgaagagtaccgtacttcgccggcggattttatgaagccgcctaagtgggttccgtttgaaacttcggtagctttcaagttatttgaatgcaggttcattttcaaaggatttatggcggaaaccaccgaagggaatgttcccgacatccaccgtgtcggcggcgtaattgacggctgtgacgtcatcttcgtacggagctgttacgagtatgaagcggagtggttaggacttacacaagaacttcaccggaaaccggttataccggtcggagttttgcctccaaaaccggacgaaaagtttgaagataccgacacgtggctgtctgttaaaaaatggttggactcacggaaaagtaagtccattgtctacgtagcttttggttcagaagctaaaccgagtcaaacggagctaaatgagatcgctctcggtttagagctttctggtttacctttcttttgggtgttaaagactcgtcgtggtccgtgggataccgaaccggtcgagcttccggaaggattcgaagagcgtacagcggatagagggatggtgtggagaggttgggttgagcaattgcgtacattgagccatgactcgatcggtttggttctgactcatcccggttggggaacgataattgaagctatccggtttgctaaaccgatggcaatgctggtttttgtgtatgaccaaggattgaatgcgagagtcattgaagagaagaaaattgggtatatgatccctcgagacgagacagaaggtttctttactaaagaaagtgttgcgaattcgctaagattggtaatggtggaagaagaaggaaaggtttatagagagaatgtgaaggagatgaaaggagtgtttggagatatggatagacaagatcgttatgtggattcattcttggaatatcttgttactaatcgttaactttgagtcttgatccaatggtcggttaattgagtgaagttgatcaagtgttgcaaggatgatcattgtataatgttatgatattttggaatggtcaagttttcttgag

SEQ ID NO: 33601 - protein, 475 aa, Arabidopsis thaliana
  misc_feature (1)..(475): Ceres Seq. ID no. 13603536
IIKVKMTNFKDNDGDGTKLHVVMFPWLAFGHMVPYLELSKLIAQKGHKVSFISTPRNIDRLLPWLPENLSSVINFVKLSLPVGDNKLPEDGEATTDVPFELIPYLKIAYDGLKVPVTEFLESSKPDWVLQDFAGFWLPPISRRLGIKTGFFSAFNGATLGILKPPGFEEYRTSPADFMKPPKWVPFETSVAFKLFECRFIFKGFMAETTEGNVPDIHRVGGVIDGCDVIFVRSCYEYEAEWLGLTQELHRKPVIPVGVLPPKPDEKFEDTDTWLSVKKWLDSRKSKSIVYVAFGSEAKPSQTELNEIALGLELSGLPFFWVLKTRRGPWDTEPVELPEGFEERTADRGMVWRGWVEQLRTLSHDSIGLVLTHPGWGTIIEAIRFAKPMAMLVFVYDQGLNARVIEEKKIGYMIPRDETEGFFTKESVANSLRLVMVEEEGKVYRENVKEMKGVFGDMDRQDRYVDSFLEYLVTNR

SEQ ID NO: 33602 - protein, 470 aa, Arabidopsis thaliana
  misc_feature (1)..(470): Ceres Seq. ID no. 13603537
MTNFKDNDGDGTKLHVVMFPWLAFGHMVPYLELSKLIAQKGHKVSFISTPRNIDRLLPWLPENLSSVINFVKLSLPVGDNKLPEDGEATTDVPFELIPYLKIAYDGLKVPVTEFLESSKPDWVLQDFAGFWLPPISRRLGIKTGFFSAFNGATLGILKPPGFEEYRTSPADFMKPPKWVPFETSVAFKLFECRFIFKGFMAETTEGNVPDIHRVGGVIDGCDVIFVRSCYEYEAEWLGLTQELHRKPVIPVGVLPPKPDEKFEDTDTWLSVKKWLDSRKSKSIVYVAFGSEAKPSQTELNEIALGLELSGLPFFWVLKTRRGPWDTEPVELPEGFEERTADRGMVWRGWVEQLRTLSHDSIGLVLTHPGWGTIIEAIRFAKPMAMLVFVYDQGLNARVIEEKKIGYMIPRDETEGFFTKESVANSLRLVMVEEEGKVYRENVKEMKGVFGDMDRQDRYVDSFLEYLVTNR

SEQ ID NO: 33603 - protein, 453 aa, Arabidopsis thaliana
  misc_feature (1)..(453): Ceres Seq. ID no. 13603538
MFPWLAFGHMVPYLELSKLIAQKGHKVSFISTPRNIDRLLPWLPENLSSVINFVKLSLPVGDNKLPEDGEATTDVPFELIPYLKIAYDGLKVPVTEFLESSKPDWVLQDFAGFWLPPISRRLGIKTGFFSAFNGATLGILKPPGFEEYRTSPADFMKPPKWVPFETSVAFKLFECRFIFKGFMAETTEGNVPDIHRVGGVIDGCDVIFVRSCYEYEAEWLGLTQELHRKPVIPVGVLPPKPDEKFEDTDTWLSVKKWLDSRKSKSIVYVAFGSEAKPSQTELNEIALGLELSGLPFFWVLKTRRGPWDTEPVELPEGFEERTADRGMVWRGWVEQLRTLSHDSIGLVLTHPGWGTIIEAIRFAKPMAMLVFVYDQGLNARVIEEKKIGYMIPRDETEGFFTKESVANSLRLVMVEEEGKVYRENVKEMKGVFGDMDRQDRYVDSFLEYLVTNR

SEQ ID NO: 33604 - DNA, 1402 bp, Arabidopsis thaliana
  misc_feature (1)..(1402): Ceres Seq. ID no. 13603539
aaatttaccactccttccatgtttttgtttctctcttcttcttgattgttgcgcttttgttagctttctctggttcattttccatggacggaccttgacctctctgcttcccttcgtgcattttctctctctcactatcctctctctttctagtgtttgtttgatcctctgcgtactctgttcttcttctctcttcagataaaacaagtcctgcatattgaagatctgatgtcttatcgattgctaagtgtggataaggatgaactggttacgtcaccttgtttgaaagaacgtaactacttgggtctctctgattgttcctctgttgatagctcaactattcccaatgttgttgggaagagcaatctcaatttcaaagctactgaactgaggctaggtcttcctgagtctcaatctcctgagagagagactgatttcggtttgctgagtccgagaacacccgatgagaagcttctcttcccgttgctaccttctaaagacaatggttctgctactacagggcataagaatgttgtttctggtaacaagagaggatttgctgacacttgggatgagttttcgggtgtgaaaggatctgttagacctggaggaggaatcaacatgatgttgtcgccgaaagttaaggatgtctcgaagagtattcaagaagaaagatctcatgctaagggtggcttgaacaatgcaccagctgccaaggcacaggttgttggttggcctccaatcagatcataccggaagaatacaatggcttcttctacttcgaagaacactgatgaggttgatgggaaacctggtcttggtgttctgtttgtgaaggtgagcatggatggtgctccgtatctgagaaaggtcgacttgagaacttacacttcctatcaacagttgtcttctgcacttgagaaaatgttcagctgcttcacccttggtcaatgtggtcttcatggtgctcaagggagggaaagaatgagcgagattaaactgaaggatcttcttcatggatcagaatttgtgcttacttatgaagataaagacggtgattggatgcttgttggcgatgttccatgggagatatttactgaaacatgccagaaactgaagatcatgaagggttctgattctattggcttagctccaggtgcagtggagaaatcgaagaacaaagagcgggtttgaaacgaagatgctcaagacaaaaaaaaaacactatgcacagttccaatgtttaagttttatttactgatgtgtttgaaaactctttagtctttttactaatttgtgttgtaagactttggattctcttatttgtgtgtgcttgttcaaaacaaatacattcttatgtgtgtgtttctactttgaccttcaagatatttcgtctctacgc

SEQ ID NO: 33605 - protein, 321 aa, Arabidopsis thaliana
  misc_feature (1)..(321): Ceres Seq. ID no. 13603540
MSYRLLSVDKDELVTSPCLKERNYLGLSDCSSVDSSTIPNVVGKSNLNFKATELRLGLPESQSPERETDFGLLSPRTPDEKLLFPLLPSKDNGSATTGHKNVVSGNKRGFADTWDEFSGVKGSVRPGGGINMMLSPKVKDVSKSIQEERSHAKGGLNNAPAAKAQVVGWPPIRSYRKNTMASSTSKNTDEVDGKPGLGVLFVKVSMDGAPYLRKVDLRTYTSYQQLSSALEKMFSCFTLGQCGLHGAQGRERMSEIKLKDLLHGSEFVLTYEDKDGDWMLVGDVPWEIFTETCQKLKIMKGSDSIGLAPGAVEKSKNKERV

SEQ ID NO: 33606 - protein, 190 aa, Arabidopsis thaliana
  misc_feature (1)..(190): Ceres Seq. ID no. 13603541
MMLSPKVKDVSKSIQEERSHAKGGLNNAPAAKAQVVGWPPIRSYRKNTMASSTSKNTDEVDGKPGLGVLFVKVSMDGAPYLRKVDLRTYTSYQQLSSALEKMFSCFTLGQCGLHGAQGRERMSEIKLKDLLHGSEFVLTYEDKDGDWMLVGDVPWEIFTETCQKLKIMKGSDSIGLAPGAVEKSKNKERV

SEQ ID NO: 33607 - protein, 189 aa, Arabidopsis thaliana
  misc_feature (1)..(189): Ceres Seq. ID no. 13603542
MLSPKVKDVSKSIQEERSHAKGGLNNAPAAKAQVVGWPPIRSYRKNTMASSTSKNTDEVDGKPGLGVLFVKVSMDGAPYLRKVDLRTYTSYQQLSSALEKMFSCFTLGQCGLHGAQGRERMSEIKLKDLLHGSEFVLTYEDKDGDWMLVGDVPWEIFTETCQKLKIMKGSDSIGLAPGAVEKSKNKERV

SEQ ID NO: 33608 - DNA, 1352 bp, Arabidopsis thaliana
  misc_feature (1)..(1352): Ceres Seq. ID no. 13603555
gaaacggaacgtaattatttacgtgacttatgaaaagtcatcggcgattgtttctaatttgtcatcgccgccgttgaactatctcgccggcgataatgatctacgttggtggagtgcaatttctagacgagagtagctctttttcattgtcttcttcatcgcagggaagtagcttgcttgttgatgtaatgagtcatcctgtgataacgttagcttctgattcctttaagaatcttgaggaaaagaatgtttctttcgatgaaagtgattcagagagctcaacaaaagacagatatgtttacatattccaaagagaatttgctgttgtgaatccagctcttgttgattttgttggcaccgatgaagcaacaacttgtgtaggccttgttatccgcaacagaaaatctggaatgacgtctgttgcacacatggattcgccagagattgtggatttggggataagccagatgttgttattggttttacaggatgacgtagatgccgagttagatgtacatatggttggtggttatgaagatgtcgacataaaaaatgctgatggtgttggtgactatgccaaaccagagggttattcatttccgttgtgttgcaaattagtagaaactttgcagaagagaagagaaaactttcacattcaaaccctctttattcttgggcacaataccaagttggattcacaagcaaacacgtgccccatttttaatggatgcctggtgaataccagcaccggtgcaatcttgccagccagtttcaacagaacatctagatgtccggatgagatcgttagaagaattcgagtttcatcatcgtttgaagattctagctggaagggaaagttacttgacacatatgacacaaaaactgatagattcatcatcgcaccatgccgctggacaatgcgcttgattgaatatgtttgggaacttaatcagcttactgatgaagaaatcctcactaactgttccacctcaccttctgctgaaggtccagacttcgtaaacagtttaagaaggaattggggatatttactgaaatatccagaatggagcaaaacattcccaaggaggcaaccacgtgtgtttgaaagaactgtcgatggacactggaaaaaatgctgactttctcatctaatcatcatgacattatccagaaatctggctaaaaacaacggttagtgtatctaacattttgagatttatgtaaatggtcaagaacacatgtgattgattcttggacacagaaaatgtttgatttatctttttgactttttgtatcaaacgttgcaagtttggttcctatgaaaatatgggccggatcaggcccggtagacc

SEQ ID NO: 33609 - protein, 347 aa, Arabidopsis thaliana
  misc_feature (1)..(347): Ceres Seq. ID no. 13603556
MIYVGGVQFLDESSSFSLSSSSQGSSLLVDVMSHPVITLASDSFKNLEEKNVSFDESDSESSTKDRYVYIFQREFAVVNPALVDFVGTDEATTCVGLVIRNRKSGMTSVAHMDSPEIVDLGISQMLLLVLQDDVDAELDVHMVGGYEDVDIKNADGVGDYAKPEGYSFPLCCKLVETLQKRRENFHIQTLFILGHNTKLDSQANTCPIFNGCLVNTSTGAILPASFNRTSRCPDEIVRRIRVSSSFEDSSWKGKLLDTYDTKTDRFIIAPCRWTMRLIEYVWELNQLTDEEILTNCSTSPSAEGPDFVNSLRRNWGYLLKYPEWSKTFPRRQPRVFERTVDGHWKKC

SEQ ID NO: 33610 - protein, 316 aa, Arabidopsis thaliana
  misc_feature (1)..(316): Ceres Seq. ID no. 13603557
MSHPVITLASDSFKNLEEKNVSFDESDSESSTKDRYVYIFQREFAVVNPALVDFVGTDEATTCVGLVIRNRKSGMTSVAHMDSPEIVDLGISQMLLLVLQDDVDAELDVHMVGGYEDVDIKNADGVGDYAKPEGYSFPLCCKLVETLQKRRENFHIQTLFILGHNTKLDSQANTCPIFNGCLVNTSTGAILPASFNRTSRCPDEIVRRIRVSSSFEDSSWKGKLLDTYDTKTDRFIIAPCRWTMRLIEYVWELNQLTDEEILTNCSTSPSAEGPDFVNSLRRNWGYLLKYPEWSKTFPRRQPRVFERTVDGHWKKC

SEQ ID NO: 33611 - protein, 242 aa, Arabidopsis thaliana
  misc_feature (1)..(242): Ceres Seq. ID no. 13603558
MTSVAHMDSPEIVDLGISQMLLLVLQDDVDAELDVHMVGGYEDVDIKNADGVGDYAKPEGYSFPLCCKLVETLQKRRENFHIQTLFILGHNTKLDSQANTCPIFNGCLVNTSTGAILPASFNRTSRCPDEIVRRIRVSSSFEDSSWKGKLLDTYDTKTDRFIIAPCRWTMRLIEYVWELNQLTDEEILTNCSTSPSAEGPDFVNSLRRNWGYLLKYPEWSKTFPRRQPRVFERTVDGHWKKC

SEQ ID NO: 33612 - DNA, 1302 bp, Arabidopsis thaliana
  misc_feature (1)..(1302): Ceres Seq. ID no. 13603565
acagggaaaagcagagcactctttatctcttcttctctctttcttctactctgtgatcaaactatcgaagaaaaaacaaaccctagatttatccgcccctcttcttcctctgatgataagaaagtcgaagactttgagaatctaaagctgaaaaattttgttttttttcattgagggaatcgaatcgagttatgtacaaggatcggagtggaggaggaataatgggtggtggtggatcatcgagatcggagatccttggtggagctattgatcggaaacgaatcaatgatgctttagacaaacatcttaagaaatcttcaccttctacatctagggttttcacttctaaggacaaagattctgtcccttctacttcaactgctaaatctcagcttcattctcgttcccccgatgttgaatctgacacggatagtgaaggatcagatgtgagtggttcagaaggtgatgatacctcttggatctcatggttttgtaatttgagagggaatgagtttttctgtgaagtagatgaagattatatacaagatgatttcaatctctgtggtttgagtggtcaagttccttactatgattatgcacttgatctcattttagatgttgaatcatcaaatggtgatatgtttactgaagaacagcatgagatggtggaatcagctgctgagatgttatatggtcttattcatgttcgttatattctcactactaaaggaatggctgctatgatggagaagtataagaattatgatttcgggagatgccccagagttttctgttgcggacagtcttgtcttccggttggccaatctgatatcccgaggtcgagcactgtgaagatatactgcccaaaatgcgaggatatttactacccgcgatctaaataccaaggcaacattgatggagcttactttggaactactttccctcatttgtttctcatggcctatgggaacatgaaaccgcagaagccggctcaaaactacgttcctaagatctttggctttaaggtacacaacaaacaatgatactctctcctctcaacagtcttgtggttgaatacaatctcggtggctaaaccaccattcttctgatggtcacgggtttgaaatggatgatactaaactgcgtttggaggatgagaagagctaatgaagaaaggtcgacacttaaaagtttttcactatgtaatctcaaaagttctaagtagaatcttcaacatagaaccgttctttgatgggtcttgggaaattctttacctgtgagtaatcaattaaatcatttacc

SEQ ID NO: 33613 - protein, 283 aa, Arabidopsis thaliana
  misc_feature (1)..(283): Ceres Seq. ID no. 13603566
MYKDRSGGGIMGGGGSSRSEILGGAIDRKRINDALDKHLKKSSPSTSRVFTSKDKDSVPSTSTAKSQLHSRSPDVESDTDSEGSDVSGSEGDDTSWISWFCNLRGNEFFCEVDEDYIQDDFNLCGLSGQVPYYDYALDLILDVESSNGDMFTEEQHEMVESAAEMLYGLIHVRYILTTKGMAAMMEKYKNYDFGRCPRVFCCGQSCLPVGQSDIPRSSTVKIYCPKCEDIYYPRSKYQGNIDGAYFGTTFPHLFLMAYGNMKPQKPAQNYVPKIFGFKVHNKQ

SEQ ID NO: 33614 - protein, 273 aa, Arabidopsis thaliana
  misc_feature (1)..(273): Ceres Seq. ID no. 13603567
MGGGGSSRSEILGGAIDRKRINDALDKHLKKSSPSTSRVFTSKDKDSVPSTSTAKSQLHSRSPDVESDTDSEGSDVSGSEGDDTSWISWFCNLRGNEFFCEVDEDYIQDDFNLCGLSGQVPYYDYALDLILDVESSNGDMFTEEQHEMVESAAEMLYGLIHVRYILTTKGMAAMMEKYKNYDFGRCPRVFCCGQSCLPVGQSDIPRSSTVKIYCPKCEDIYYPRSKYQGNIDGAYFGTTFPHLFLMAYGNMKPQKPAQNYVPKIFGFKVHNKQ

SEQ ID NO: 33615 - DNA, 1153 bp, Arabidopsis thaliana
  misc_feature (1)..(1153): Ceres Seq. ID no. 13603568
aaccatctctctaaagcttcttctctcataacaatggcaagacaaatcaacatagagagtagtgtttctcaagttacctttatctcctccgccatccccgccgtatcttcctcctcctccatcaccgcttccgcctcattgtcctcttcacctactacatcttcctcttcttcgtcatcaacaaattctaacttcattgaggaagacaactctaaaagaaaagcatctcgaagatcattgtcatcgttagtctccgttgaagacgatgatgatcaaaacggtggaggtgggaaacggcgaaagaccaacggtggagataaacatccgacgtatagaggagtgaggatgaggagttggggaaaatgggtgtcggagattagagagccgagaaagaaatcaagaatctggctcgggacttatccaacggctgagatggcagctcgagctcatgacgtagcggctttagccattaaaggtacaacggcttacctcaattttcccaagttagccggcgagcttcctcgtccagtcacaaattctcctaaagacattcaagccgccgcctctttagcggccgttaactggcaagattcggtcaacgatgtgagtaattctgaagtggctgaaatagttgaagccgagccgagtcgagccgtggtggctcagttgttttcttcggacacaagcacgacgacgacgactcagagtcaagagtattcggaagcttcgtgtgcttcgacttcggcgtgtacggacaaagacagtgaggaagagaagctgtttgatttgccggatttgtttaccgatgagaatgagatgatgatacgaaacgatgcgttttgctactactcgtccacgtggcagctttgtggagccgatgctgggtttcggcttgaagagccgttttttctatctgaatgactaaagtacccctctcgagagagctctcactaacactttattagtttgccatttacttcttcttcattttctctatttacgtttgatatttttttttctttccaacttgagtgatattgattttttgtaaagaaacaatttcttttttttttcctagcaaaatcgtgtttgtgtaatataaatgtggtgataacatgttgaaatattgcagaataatataatgtagccttac

SEQ ID NO: 33616 - protein, 306 aa, Arabidopsis thaliana
  misc_feature (1)..(306): Ceres Seq. ID no. 13603569
NHLSKASSLITMARQINIESSVSQVTFISSAIPAVSSSSSITASASLSSSPTTSSSSSSSTNSNFIEEDNSKRKASRRSLSSLVSVEDDDDQNGGGGKRRKTNGGDKHPTYRGVRMRSWGKWVSEIREPRKKSRIWLGTYPTAEMAARAHDVAALAIKGTTAYLNFPKLAGELPRPVTNSPKDIQAAASLAAVNWQDSVNDVSNSEVAEIVEAEPSRAVVAQLFSSDTSTTTTTQSQEYSEASCASTSACTDKDSEEEKLFDLPDLFTDENEMMIRNDAFCYYSSTWQLCGADAGFRLEEPFFLSE

SEQ ID NO: 33617 - protein, 295 aa, Arabidopsis thaliana
  misc_feature (1)..(295): Ceres Seq. ID no. 13603570
MARQINIESSVSQVTFISSAIPAVSSSSSITASASLSSSPTTSSSSSSSTNSNFIEEDNSKRKASRRSLSSLVSVEDDDDQNGGGGKRRKTNGGDKHPTYRGVRMRSWGKWVSEIREPRKKSRIWLGTYPTAEMAARAHDVAALAIKGTTAYLNFPKLAGELPRPVTNSPKDIQAAASLAAVNWQDSVNDVSNSEVAEIVEAEPSRAVVAQLFSSDTSTTTTTQSQEYSEASCASTSACTDKDSEEEKLFDLPDLFTDENEMMIRNDAFCYYSSTWQLCGADAGFRLEEPFFLSE

SEQ ID NO: 33618 - protein, 191 aa, Arabidopsis thaliana
  misc_feature (1)..(191): Ceres Seq. ID no. 13603571
MRSWGKWVSEIREPRKKSRIWLGTYPTAEMAARAHDVAALAIKGTTAYLNFPKLAGELPRPVTNSPKDIQAAASLAAVNWQDSVNDVSNSEVAEIVEAEPSRAVVAQLFSSDTSTTTTTQSQEYSEASCASTSACTDKDSEEEKLFDLPDLFTDENEMMIRNDAFCYYSSTWQLCGADAGFRLEEPFFLSE

SEQ ID NO: 33619 - DNA, 1298 bp, Arabidopsis thaliana
  misc_feature (1)..(1298): Ceres Seq. ID no. 13603572
atccaaaataacaaaacatctcttcacttctcatcacaccatgcatcatcatcatcatccatgcaatcgcaaacccttcacaaccatcttctccttcttccttctctatctcaatctccataaccaacaaattatcgaagctcgaaatccatctcaatttacgaccaacccatcccctgacgtctctataccggaaatcaaacgtcacctccaacagtacggttacctcccacaaaacaaagaatccgacgacgtttcgttcgaacaagctctcgttcgttaccagaaaaatctcggtctaccaataaccggtaaaccggattccgacacgttgtcacagattctattaccaagatgtgggttccctgatgacgtggaacccaaaacggcaccgtttcacacaggaaaaaaatacgtgtacttccccggacggcccaggtggacaagagacgtcccactgaaactcacgtacgccttctcgcaggagaacctaactccttacttagcaccaactgacatacggcgcgtgttccgacgcgctttcggcaagtgggcttcggtgatcccagtatccttcatcgaaacagaggattacgtcatcgccgacatcaagatcggattcttcaacggagatcacggcgacggagaaccgttcgacggcgttttaggtgttttagcacacactttctctccggaaaacggtaggcttcatctagacaaagcagagacgtgggccgtagatttcgatgaggaaaaatctagtgtggccgtcgatttggaatctgtggcggtgcacgagatcggtcacgtgcttggattaggacatagctcggtgaaagacgcggctatgtatccaactttaaagccaagaagtaagaaagtgaatttgaatatggacgacgtcgttggagtacagtctttgtacggaacaaaccctaatttcacgttaaatagtttacttgcgtcggaaacttcgacaaatctagccgatggttcgaggatacggtctcaaggaatgatctattcgactttgagtactgttatcgctctctgttttcttaattggtagttcgtagacttagataattttctttatacaagaaatccgaaaacgtatagaatcatacagacgcatgaatttgttgttcaaagtagtagtctaatcctatgtttctgtttagaataataccatgttcttttttagtttatattagattgggcttcaagttatacggcccaatagaatgctaatgtattaaacgaagaacccagttcagagcaacacaattcgttggcct

SEQ ID NO: 33620 - protein, 355 aa, Arabidopsis thaliana
  misc_feature (1)..(355): Ceres Seq. ID no. 13603573
SKITKHLFTSHHTMHHHHHPCNRKPFTTIFSFFLLYLNLHNQQIIEARNPSQFTTNPSPDVSIPEIKRHLQQYGYLPQNKESDDVSFEQALVRYQKNLGLPITGKPDSDTLSQILLPRCGFPDDVEPKTAPFHTGKKYVYFPGRPRWTRDVPLKLTYAFSQENLTPYLAPTDIRRVFRRAFGKWASVIPVSFIETEDYVIADIKIGFFNGDHGDGEPFDGVLGVLAHTFSPENGRLHLDKAETWAVDFDEEKSSVAVDLESVAVHEIGHVLGLGHSSVKDAAMYPTLKPRSKKVNLNMDDVVGVQSLYGTNPNFTLNSLLASETSTNLADGSRIRSQGMIYSTLSTVIALCFLNW

SEQ ID NO: 33621 - protein, 342 aa, Arabidopsis thaliana
  misc_feature (1)..(342): Ceres Seq. ID no. 13603574
MHHHHHPCNRKPFTTIFSFFLLYLNLHNQQIIEARNPSQFTTNPSPDVSIPEIKRHLQQYGYLPQNKESDDVSFEQALVRYQKNLGLPITGKPDSDTLSQILLPRCGFPDDVEPKTAPFHTGKKYVYFPGRPRWTRDVPLKLTYAFSQENLTPYLAPTDIRRVFRRAFGKWASVIPVSFIETEDYVIADIKIGFFNGDHGDGEPFDGVLGVLAHTFSPENGRLHLDKAETWAVDFDEEKSSVAVDLESVAVHEIGHVLGLGHSSVKDAAMYPTLKPRSKKVNLNMDDVVGVQSLYGTNPNFTLNSLLASETSTNLADGSRIRSQGMIYSTLSTVIALCFLNW

SEQ ID NO: 33622 - DNA, 1003 bp, Arabidopsis thaliana
  misc_feature (1)..(1003): Ceres Seq. ID no. 13603578
agatcatggtggggttttttattttctccttatcaagaatcctctgatcagtcaaatacccatcaatcaatcaaatccccaaacactcccaaaaaaagatcagcttccaatatttttccccttcttacaaaaaagatgtctatgtcgtctatgtcctccccttcctcagctgtttgttcaccggaccacttctctccttccgaccatctctgctatgtccaatgcaacttttgccaaaccatccttgcggttaatgttccttacacaagcttgttcaagaccgtaactgtccgatgtggttgctgtaccaatctcctttcggtgaacatgagatcatatgtcctcccagcttctaaccagctccagctccagctcggtcctcactcttacttcaatccccaggatattctggaggagctgagagatgcaccgtctaacatgaatatgatgatgatgaatcaacatcctactatgaatgacataccatctttcatggatcttcatcaacaacatgagattcctaaagcaccacccgttaaccgccctccagagaaaagacagagagtcccatccgcatataaccgattcatcaaggaggagatccaacgtatcaaagctggtaatcctgatataagccacagagaagcctttagtgctgctgccaagaattgggcccacttcccccacatacacttcgggctcgtgccagacaatcaacccgtgaagaaaaccaacatgccccaacaggagggagaggataacatggtgatgaaagaagggttctacgctcctgcagctgctaacgttggtgtgactccttattaaagagataaatataatcgactaagtatttgaggaattgaaatccaatttcttagggtttatcatgtccaaaagttgtggtttcttttcctttcttgaacttatttatatatattataaatatgcatgtgtctttttctgttgttgtaatcaaaaatcttgctaattaatggggtttctt

SEQ ID NO: 33623 - protein, 274 aa, Arabidopsis thaliana
  misc_feature (1)..(274): Ceres Seq. ID no. 13603579
RSWWGFLFSPYQESSDQSNTHQSIKSPNTPKKRSASNIFPLLTKKMSMSSMSSPSSAVCSPDHFSPSDHLCYVQCNFCQTILAVNVPYTSLFKTVTVRCGCCTNLLSVNMRSYVLPASNQLQLQLGPHSYFNPQDILEELRDAPSNMNMMMMNQHPTMNDIPSFMDLHQQHEIPKAPPVNRPPEKRQRVPSAYNRFIKEEIQRIKAGNPDISHREAFSAAAKNWAHFPHIHFGLVPDNQPVKKTNMPQQEGEDNMVMKEGFYAPAAANVGVTPY

SEQ ID NO: 33624 - protein, 229 aa, Arabidopsis thaliana
  misc_feature (1)..(229): Ceres Seq. ID no. 13603580
MSMSSMSSPSSAVCSPDHFSPSDHLCYVQCNFCQTILAVNVPYTSLFKTVTVRCGCCTNLLSVNMRSYVLPASNQLQLQLGPHSYFNPQDILEELRDAPSNMNMMMMNQHPTMNDIPSFMDLHQQHEIPKAPPVNRPPEKRQRVPSAYNRFIKEEIQRIKAGNPDISHREAFSAAAKNWAHFPHIHFGLVPDNQPVKKTNMPQQEGEDNMVMKEGFYAPAAANVGVTPY

SEQ ID NO: 33625 - protein, 227 aa, Arabidopsis thaliana
  misc_feature (1)..(227): Ceres Seq. ID no. 13603581
MSSMSSPSSAVCSPDHFSPSDHLCYVQCNFCQTILAVNVPYTSLFKTVTVRCGCCTNLLSVNMRSYVLPASNQLQLQLGPHSYFNPQDILEELRDAPSNMNMMMMNQHPTMNDIPSFMDLHQQHEIPKAPPVNRPPEKRQRVPSAYNRFIKEEIQRIKAGNPDISHREAFSAAAKNWAHFPHIHFGLVPDNQPVKKTNMPQQEGEDNMVMKEGFYAPAAANVGVTPY

SEQ ID NO: 33626 - DNA, 1608 bp, Arabidopsis thaliana
  misc_feature (1)..(1608): Ceres Seq. ID no. 13603586
atttccgttcacttcctagaaaagtaagtatatacctttctctgtatttccttcacctccggctaaatctccggcgaccgcgtaacttgttctccggtctgaatagtgaataaacacacacacggagccaaatccaggagaaattaggtttgaattagagagattaggagaatacaaattggtttggtggttttcaagtatgctaccaagtgggttgaaagaaacccaactccgtgagagcaacaacaaccaaaaagtccatcctcaaccaatggaagagtctatcaatcagaatcctgaagctatggaagcacttatctccaatctcttcggaaacatctcgtctttgaaatctgcttatatcgagcttcaaagtgctcatactccttacgatcccgagaagattcaggcagcggacaaagttgtcatttctgaactcaagaatctttccgaaatgaagcatttttacagagagaataaccccaaacctgtatgtgtctctccacaagactctcgtttagctgcagagatccaagagcagcagagtttgttgaagacttatgaggttatggtgaagaagtttcagtctgagattcagaacaaggattctgagatcacgcagatgctacagaagattgaggaagcaaaccagaaacggcttaagcttgagaagaatcttaagttaagaggaatgtctacaaacgaaggttctaatggagatggaaatatgcagtttcctgacttaactactgaactctatgtatctacttacgaagctgctgctaaagccgtgcacgatttctccaagccgctaatcaacatgatgaaagcagcaggatgggatcttgattctgcagccaattctattgagcctgatgttgtttacgccaagaggcctcacaagaaatatgcatttgaatcatacatatgccaaaggatgttcagtgggtttcagcagaagaacttctcagtaaactcagagagtgctgcggttatggccaatgatgacacagacacctttttccgccagtttcttgctctcaaggacatggatccactagatgctctaggtacaaaccctgattccaactttggtatattctgcaggagcaagtatctcctcttggtccacccaaagatggaagcttctttctttggaaatctagatcagcgtgactacgtgacaggaggtgggcacccgaggactgcgttttaccaggccttcttaaaacttgcaaagtcgatatggatcttgcacaggcttgcttactcttttgatccagctgcaaagatcttccaagtgaaaaagggtagtgagttctctgattcatacatggaaagtgttgtgaagaacatagttgtggatgaaaaagaagagaacccaagagttggtcttatggttatgcctgggttttggattggtggcagtgtcattcaaagccgagtttatgtttctggtgtgaaggtccttgagtgaaggatctcaggaactctcttaatgcttcttcccactttgttgtgcaacttttattttctctttgttataagcaagcctatatgtatcatctattgttaaaaaaaaaaaggaattaatatcttcttcgtctc

SEQ ID NO: 33627 - protein, 425 aa, Arabidopsis thaliana
  misc_feature (1)..(425): Ceres Seq. ID no. 13603587
MLPSGLKETQLRESNNNQKVHPQPMEESINQNPEAMEALISNLFGNISSLKSAYIELQSAHTPYDPEKIQAADKVVISELKNLSEMKHFYRENNPKPVCVSPQDSRLAAEIQEQQSLLKTYEVMVKKFQSEIQNKDSEITQMLQKIEEANQKRLKLEKNLKLRGMSTNEGSNGDGNMQFPDLTTELYVSTYEAAAKAVHDFSKPLINMMKAAGWDLDSAANSIEPDVVYAKRPHKKYAFESYICQRMFSGFQQKNFSVNSESAAVMANDDTDTFFRQFLALKDMDPLDALGTNPDSNFGIFCRSKYLLLVHPKMEASFFGNLDQRDYVTGGGHPRTAFYQAFLKLAKSIWILHRLAYSFDPAAKIFQVKKGSEFSDSYMESVVKNIVVDEKEENPRVGLMVMPGFWIGGSVIQSRVYVSGVKVLE

SEQ ID NO: 33628 - protein, 401 aa, Arabidopsis thaliana
  misc_feature (1)..(401): Ceres Seq. ID no. 13603588
MEESINQNPEAMEALISNLFGNISSLKSAYIELQSAHTPYDPEKIQAADKVVISELKNLSEMKHFYRENNPKPVCVSPQDSRLAAEIQEQQSLLKTYEVMVKKFQSEIQNKDSEITQMLQKIEEANQKRLKLEKNLKLRGMSTNEGSNGDGNMQFPDLTTELYVSTYEAAAKAVHDFSKPLINMMKAAGWDLDSAANSIEPDVVYAKRPHKKYAFESYICQRMFSGFQQKNFSVNSESAAVMANDDTDTFFRQFLALKDMDPLDALGTNPDSNFGIFCRSKYLLLVHPKMEASFFGNLDQRDYVTGGGHPRTAFYQAFLKLAKSIWILHRLAYSFDPAAKIFQVKKGSEFSDSYMESVVKNIVVDEKEENPRVGLMVMPGFWIGGSVIQSRVYVSGVKVLE

SEQ ID NO: 33629 - protein, 390 aa, Arabidopsis thaliana
  misc_feature (1)..(390): Ceres Seq. ID no. 13603589
MEALISNLFGNISSLKSAYIELQSAHTPYDPEKIQAADKVVISELKNLSEMKHFYRENNPKPVCVSPQDSRLAAEIQEQQSLLKTYEVMVKKFQSEIQNKDSEITQMLQKIEEANQKRLKLEKNLKLRGMSTNEGSNGDGNMQFPDLTTELYVSTYEAAAKAVHDFSKPLINMMKAAGWDLDSAANSIEPDVVYAKRPHKKYAFESYICQRMFSGFQQKNFSVNSESAAVMANDDTDTFFRQFLALKDMDPLDALGTNPDSNFGIFCRSKYLLLVHPKMEASFFGNLDQRDYVTGGGHPRTAFYQAFLKLAKSIWILHRLAYSFDPAAKIFQVKKGSEFSDSYMESVVKNIVVDEKEENPRVGLMVMPGFWIGGSVIQSRVYVSGVKVLE

SEQ ID NO: 33630 - DNA, 1291 bp, Arabidopsis thaliana
  misc_feature (1)..(1291): Ceres Seq. ID no. 13603604
aaaagaaaatatatatggtttcacaaacaccattaccataactacaacgagaagaggatcttttttaaggagaaaagcagagagagaagagacgagtgtgtgaagtttttttgtcttttgtttcttttattacacacaaatagatgaaacgaggaaagctacttcttttgctacttccataaaaaggttcttcctttcgcagagaatcaactttgatcatcttcttccttctctttctttcttcttctccctccagtaatgcttatatagtctcctcctatatctctacctatacatacacaaaccctttatcctcgaaagcttcctcctggttaggtttttatcaaacccttttagccaatcgggaaattaactaaagaagaagatatggtgaggggcaaaactcagatgaagagaatagagaatgcaacaagcagacaagtgactttctccaaaagaaggaatggtttgttgaagaaagcctttgagctctcagtgctttgtgatgctgaagtttctcttatcatcttctctcctaaaggcaaactttatgaattcgccagctccaatatgcaagataccatagatcgttatctgaggcatactaaggatcgagtcagcaccaaaccggtttctgaagaaaatatgcagcatttgaaatatgaagcagcaaacatgatgaagaaaattgaacaactcgaagcttctaaacgtaaactcttgggagaaggcataggaacatgctcaatcgaggagctgcaacagattgagcaacagcttgagaaaagtgtcaaatgtattcgagcaagaaagactcaagtgtttaaggaacaaattgagcagctcaagcaaaaggagaaagctctagctgcagaaaacgagaagctctctgaaaagtggggatctcatgaaagcgaagtttggtcaaataagaatcaagaaagtactggaagaggtgatgaagagagtagcccaagttctgaagtagagacgcaattgttcattgggttaccttgttcttcaagaaagtgatctccactcaacaaaaaaaacaaaaaaacaaactaagtaaaaacaggtttagcagtactgagagtgtataaggacaagtaacaaaactctaaagctgcttctctcttgttgtcttatttctctctcactctctctctctcagtcacttctttaatgattctgaactgcttgtgttatgtatctatgttcttacacttgcctctctagaatgtaattttgattatgttttgttttcatgtatcaatttagctttcttccc

SEQ ID NO: 33631 - protein, 214 aa, Arabidopsis thaliana; identical to SEQ ID NO: 31415
  misc_feature (1)..(214): Ceres Seq. ID no. 13603605

SEQ ID NO: 33632 - protein, 207 aa, Arabidopsis thaliana; identical to SEQ ID NO: 31416
  misc_feature (1)..(207): Ceres Seq. ID no. 13603606

SEQ ID NO: 33633 - protein, 153 aa, Arabidopsis thaliana; identical to SEQ ID NO: 31417
  misc_feature (1)..(153): Ceres Seq. ID no. 13603607

SEQ ID NO: 33634 - DNA, 1428 bp, Arabidopsis thaliana
  misc_feature (1)..(1428): Ceres Seq. ID no. 13603608
aagaaatgtctctgtcattgtgcagtagataagccactctctctctctttctctctttttgctattataaagaaaaagattcattctcccaccattgaggtttaacttatacaaacagatctttttgaaattggattcatctaagaagcagactctgttttcatggctgtttacaataccaaactctgtttggcctctgttttcttgctcttagggcttctcttggcttttgacttgaagggtatagaagcagaaagtcttaccaaacagaaactggactcgaagatacttcaggatgagattgtgaagaaagtcaacgaaaacccaaacgctggatggaaagctgctataaatgatcgattttcaaacgccactgttgcagagtttaagcgtcttctcggtgttaaaccaacaccaaagaagcatttcttaggtgttcctattgtgagccatgatccatctttgaagctacctaaagcttttgatgctagaactgcttggccacagtgcactagtattggaaacatcttagatcagggacattgtggttcttgctgggcatttggtgctgttgaatcactatcagatagattctgtatccaatttggcatgaacatttctttatcagtaaatgatctcctagcttgttgtggattccgttgtggtgatggttgtgacggtggctatccaattgctgcttggcaatacttttcgtatagcggtgttgtcacagaagagtgtgatccatactttgataataccggatgctctcacccgggttgcgaaccggcatatcctacaccgaaatgttcgaggaaatgcgttagcgacaacaaactatggagcgagtcgaagcattacagtgttagtacatacactgtgaaatctaatccacaagatatcatggcagaggtttataagaatggacctgttgaagtctcttttaccgtttatgaggattttgctcattacaaatctggagtctataagcacataacaggttctaacattggaggtcatgctgttaaacttattggttggggaactagcagtgaaggagaagattattggttgatggcaaatcaatggaacagaggctggggtgatgatggttatttcatgataaggagaggaactaatgaatgtggaattgaagatgaaccagtagctggtttgccttcaagcaagaatgtgtttagggttgataccggttcgaatgatcttccggttgcatcggtttaagatcaaagatggaaatgttgcatcggtttaatatcaaagatgaaaagttgtttgtaagatatatatgttatggttgttgtttccagtaaaagattccggtgactagaaattgttttctggttggctgtgaaaatgttatacaaataaacacttcaacttaagcaatataatatcatttctactttt

SEQ ID NO: 33635 - protein, 359 aa, Arabidopsis thaliana
  misc_feature (1)..(359): Ceres Seq. ID no. 13603609
MAVYNTKLCLASVFLLLGLLLAFDLKGIEAESLTKQKLDSKILQDEIVKKVNENPNAGWKAAINDRFSNATVAEFKRLLGVKPTPKKHFLGVPIVSHDPSLKLPKAFDARTAWPQCTSIGNILDQGHCGSCWAFGAVESLSDRFCIQFGMNISLSVNDLLACCGFRCGDGCDGGYPIAAWQYFSYSGVVTEECDPYFDNTGCSHPGCEPAYPTPKCSRKCVSDNKLWSESKHYSVSTYTVKSNPQDIMAEVYKNGPVEVSFTVYEDFAHYKSGVYKHITGSNIGGHAVKLIGWGTSSEGEDYWLMANQWNRGWGDDGYFMIRRGTNECGIEDEPVAGLPSSKNVFRVDTGSNDLPVASV

SEQ ID NO: 33636 - protein, 210 aa, Arabidopsis thaliana
  misc_feature (1)..(210): Ceres Seq. ID no. 13603610
MNISLSVNDLLACCGFRCGDGCDGGYPIAAWQYFSYSGVVTEECDPYFDNTGCSHPGCEPAYPTPKCSRKCVSDNKLWSESKHYSVSTYTVKSNPQDIMAEVYKNGPVEVSFTVYEDFAHYKSGVYKHITGSNIGGHAVKLIGWGTSSEGEDYWLMANQWNRGWGDDGYFMIRRGTNECGIEDEPVAGLPSSKNVFRVDTGSNDLPVASV

SEQ ID NO: 33637 - DNA, 1275 bp, Arabidopsis thaliana
  misc_feature (1)..(1275): Ceres Seq. ID no. 13603682
ctctccactctctcaatctcttaacttaaacaaaaccaacaattatcaatcttcaatgacgcatctcaacaaaaaacagaggttagagaataaccataacaatactgtgaacaaccatttcgaagacttacatgacgatctcatcatctctatcctccgcaaactcgctacctccgcttcttctccttccgatttcctcaccgttctctccacatgcaagagattgaatcggttaggattacatcctctggttttatctaaagccggtactcaaaccctagccgtcacggcggagaaatggtcagattcttctcataaattcctcaaactctgtgttaatgccggaaacatcgacgcttcgtactctctcggaatgatccgattttactgtctacaaaatccagtgagcggcgcgtcattaatggctaaagcggcgattaaatcacacgcgccggcgctttattcgttatcggtgattcagtttaacggaagcggcggttcaaaaaccgataagaatctacgcgccggcgttgctctttgtgcacgctctgcttatttaggccacgtcgatgcgttacgagagcttggtcactgtcttcaagacggttacggtgttcctcgtgacgtctccgaaggtcgtcgtcttttgattcaagctaacgcgcgtgagctcgcgtgttctctacgctcttacctctctctgaaatctggggacgagaacgagaccttaactgatttaagcgtggttccggttcaggagattcatccggttaaccggtttttaaaagagtggtttagttcgggtcgggttgatttagcggaagggttaaggatgtgttcgcatggtggttgtggaaggccggagactcgggctcatgagtttcggcgatgttctgtttgtgggaaggttaattattgctcgcgtggttgtcaggcgttggattggagagcgaagcataaggttgaatgtacgccgttggatttgtgggttgcggcagcggcggagattggcgacgacggtgaagcggtggcggtggagattgatgataatcatggtgagcggtaacggctctaacgctttttttcaaggaaatgactgaaatgccaacagtttctttgactgttgagtttttttttttttgggttatttaattatgttttaaaaaatttaatgttaatttcttctcttaattaattagttttggctaatggcgtttctgaatcttctgatactaaactggcatgttattttaaataatatagttttttgccgtt

SEQ ID NO: 33638 - protein, 354 aa, Arabidopsis thaliana
  misc_feature (1)..(354): Ceres Seq. ID no. 13603683
SPLSQSLNLNKTNNYQSSMTHLNKKQRLENNHNNTVNNHFEDLHDDLIISILRKLATSASSPSDFLTVLSTCKRLNRLGLHPLVLSKAGTQTLAVTAEKWSDSSHKFLKLCVNAGNIDASYSLGMIRFYCLQNPVSGASLMAKAAIKSHAPALYSLSVIQFNGSGGSKTDKNLRAGVALCARSAYLGHVDALRELGHCLQDGYGVPRDVSEGRRLLIQANARELACSLRSYLSLKSGDENETLTDLSVVPVQEIHPVNRFLKEWFSSGRVDLAEGLRMCSHGGCGRPETRAHEFRRCSVCGKVNYCSRGCQALDWRAKHKVECTPLDLWVAAAAEIGDDGEAVAVEIDDNHGER

SEQ ID NO: 33639 - protein, 336 aa, Arabidopsis thaliana
  misc_feature (1)..(336): Ceres Seq. ID no. 13603684
MTHLNKKQRLENNHNNTVNNHFEDLHDDLIISILRKLATSASSPSDFLTVLSTCKRLNRLGLHPLVLSKAGTQTLAVTAEKWSDSSHKFLKLCVNAGNIDASYSLGMIRFYCLQNPVSGASLMAKAAIKSHAPALYSLSVIQFNGSGGSKTDKNLRAGVALCARSAYLGHVDALRELGHCLQDGYGVPRDVSEGRRLLIQANARELACSLRSYLSLKSGDENETLTDLSVVPVQEIHPVNRFLKEWFSSGRVDLAEGLRMCSHGGCGRPETRAHEFRRCSVCGKVNYCSRGCQALDWRAKHKVECTPLDLWVAAAAEIGDDGEAVAVEIDDNHGER

SEQ ID NO: 33640 - protein, 230 aa, Arabidopsis thaliana
  misc_feature (1)..(230): Ceres Seq. ID no. 13603685
MIRFYCLQNPVSGASLMAKAAIKSHAPALYSLSVIQFNGSGGSKTDKNLRAGVALCARSAYLGHVDALRELGHCLQDGYGVPRDVSEGRRLLIQANARELACSLRSYLSLKSGDENETLTDLSVVPVQEIHPVNRFLKEWFSSGRVDLAEGLRMCSHGGCGRPETRAHEFRRCSVCGKVNYCSRGCQALDWRAKHKVECTPLDLWVAAAAEIGDDGEAVAVEIDDNHGER

SEQ ID NO: 33641 - DNA, 983 bp, Arabidopsis thaliana
  misc_feature (1)..(983): Ceres Seq. ID no. 13603693
aggaagataagaaaatggaggagaagaaatctgaagagccacaagcgaaatcagaagataagaaaccagaagaagagaaaaagaaagaacctcaagagattgtgcttaagatttttatgcattgtgaaggttgtgctaaaaaaatccatagatgtcttaaaggctttgaaggagtggaggatgtaactactgattgtaagactagtaaagttgtggtgaaaggagagaaggcagatccattaaaagtgttgcaaagattgcagaggaagagccatcgtcaagtggagcttatctcaccgattccggagcctaaaccggtttctgatgaaccggagaaaaaggagaaggagaaacctaaacctgaggagaaaaaagaagaggtagtgacagtggtgctgagagttcacatgcattgtgaagcatgtgccatggagattcaaaagaggatcatgagaatgaaaggagtggagtctgtggaaccagattttaaagcatcacaagtgagcgtgaaaggagtttttacgccggaaaagctagttgagttcatttacaagagaatcgggaagcatgccgcggttgtcaagcaagatccgccgccaaaacctccggagaaagaaaaagaaacgaaagacaaagacgagaagaaaaaggaagagggacagcccaaagaaggaaaagaggccaaggaaaacggtggtggaggaggtgctaaaggcgatggtgctgccgcggaggaggggaacaaagtggtagacttgaagaagaacgaatatcagtaccagccaccgaggtaccccgtggagatgtttgcttatccaccgcagatattcagtgatgaaaaccccaatgcttgtaccattatataataaaatcgtcggtttaaggggttgtaggatttgttatttttttactttatttctatgcagaattttaatttaaatgtatttttggtaatttttagtttcaaccgaattgaatgatcg

SEQ ID NO: 33642 - protein, 287 aa, Arabidopsis thaliana
  misc_feature (1)..(287): Ceres Seq. ID no. 13603694
EDKKMEEKKSEEPQAKSEDKKPEEEKKKEPQEIVLKIFMHCEGCAKKIHRCLKGFEGVEDVTTDCKTSKVVVKGEKADPLKVLQRLQRKSHRQVELISPIPEPKPVSDEPEKKEKEKPKPEEKKEEVVTVVLRVHMHCEACAMEIQKRIMRMKGVESVEPDFKASQVSVKGVFTPEKLVEFIYKRIGKHAAVVKQDPPPKPPEKEKETKDKDEKKKEEGQPKEGKEAKENGGGGGAKGDGAAAEEGNKVVDLKKNEYQYQPPRYPVEMFAYPPQIFSDENPNACTII

SEQ ID NO: 33643 - protein, 283 aa, Arabidopsis thaliana
  misc_feature (1)..(283): Ceres Seq. ID no. 13603695
MEEKKSEEPQAKSEDKKPEEEKKKEPQEIVLKIFMHCEGCAKKIHRCLKGFEGVEDVTTDCKTSKVVVKGEKADPLKVLQRLQRKSHRQVELISPIPEPKPVSDEPEKKEKEKPKPEEKKEEVVTVVLRVHMHCEACAMEIQKRIMRMKGVESVEPDFKASQVSVKGVFTPEKLVEFIYKRIGKHAAVVKQDPPPKPPEKEKETKDKDEKKKEEGQPKEGKEAKENGGGGGAKGDGAAAEEGNKVVDLKKNEYQYQPPRYPVEMFAYPPQIFSDENPNACTII

SEQ ID NO: 33644 - protein, 249 aa, Arabidopsis thaliana
  misc_feature (1)..(249): Ceres Seq. ID no. 13603696
MHCEGCAKKIHRCLKGFEGVEDVTTDCKTSKVVVKGEKADPLKVLQRLQRKSHRQVELISPIPEPKPVSDEPEKKEKEKPKPEEKKEEVVTVVLRVHMHCEACAMEIQKRIMRMKGVESVEPDFKASQVSVKGVFTPEKLVEFIYKRIGKHAAVVKQDPPPKPPEKEKETKDKDEKKKEEGQPKEGKEAKENGGGGGAKGDGAAAEEGNKVVDLKKNEYQYQPPRYPVEMFAYPPQIFSDENPNACTII

SEQ ID NO: 33645 - DNA, 987 bp, Arabidopsis thaliana
  misc_feature (1)..(987): Ceres Seq. ID no. 13603713
taatcggcaaaattttctgctcctgagaaacaagtagagatactaaagatggaatctttgaactaaattcgaaaccttttaatgggtaccgagtcgggttcggatccagaatcgagctcaaacgggtggagccgtgctcgtggtctagttgtcaagactctggttttaattggcggtgctcttctcatcaagcgtctcactaaatccaccactcgtagagatcacgcccgtgtcgtctctcgttctctcaccggagagaagtttacgagggagcaagcgtcaagagatcctgataattacttcaacataagaatgctgagttgtccagctgctgaaatggtggatggttcagaggttttgtatctcgaacaggcattttggaggactcctcagaaaccgtttcgacaaagattatatatggtgaaaccgtgtccaaaagagctaaaatgtgatgttgaggtaagttcatatgcgatcagagatgctgaggaatacaaaaatttctgtgaccggcctaaggaccaacgcccacttcctgaagaagttattggtgacattggagagcatttgacgactatacacctgaattgttgtgaccgtgggaaacgttgcttgtacgaaggctcaacttcacctggtggatttccaaattcatggaacggggctagctattgtacttcagatcttgcagttctgaaaaacaatgagatacacctctgggatcgcggctttgatgagaatcgaaaccaggtttggggaccaaaggaaggtccgtacgagttcaagccagcgacatcatcgagcatcaacgaaaacttgtctgctttgaacatcctttatcaatcttctatcgataaaccaatccaagggtccctcatcttgcaagactagccaatttgcacccccttttctattgtctgatcttctctgtatcacacttagcctctttattcatctcatctcagccactttcaatatagttttggt

SEQ ID NO: 33646 - protein, 269 aa, Arabidopsis thaliana
  misc_feature (1)..(269): Ceres Seq. ID no. 13603714
MGTESGSDPESSSNGWSRARGLVVKTLVLIGGALLIKRLTKSTTRRDHARVVSRSLTGEKFTREQASRDPDNYFNIRMLSCPAAEMVDGSEVLYLEQAFWRTPQKPFRQRLYMVKPCPKELKCDVEVSSYAIRDAEEYKNFCDRPKDQRPLPEEVIGDIGEHLTTIHLNCCDRGKRCLYEGSTSPGGFPNSWNGASYCTSDLAVLKNNEIHLWDRGFDENRNQVWGPKEGPYEFKPATSSSINENLSALNILYQSSIDKPIQGSLILQD

SEQ ID NO: 33647 - protein, 192 aa, Arabidopsis thaliana
  misc_feature (1)..(192): Ceres Seq. ID no. 13603715
MLSCPAAEMVDGSEVLYLEQAFWRTPQKPFRQRLYMVKPCPKELKCDVEVSSYAIRDAEEYKNFCDRPKDQRPLPEEVIGDIGEHLTTIHLNCCDRGKRCLYEGSTSPGGFPNSWNGASYCTSDLAVLKNNEIHLWDRGFDENRNQVWGPKEGPYEFKPATSSSINENLSALNILYQSSIDKPIQGSLILQD

SEQ ID NO: 33648 - protein, 184 aa, Arabidopsis thaliana
  misc_feature (1)..(184): Ceres Seq. ID no. 13603716
MVDGSEVLYLEQAFWRTPQKPFRQRLYMVKPCPKELKCDVEVSSYAIRDAEEYKNFCDRPKDQRPLPEEVIGDIGEHLTTIHLNCCDRGKRCLYEGSTSPGGFPNSWNGASYCTSDLAVLKNNEIHLWDRGFDENRNQVWGPKEGPYEFKPATSSSINENLSALNILYQSSIDKPIQGSLILQD

SEQ ID NO: 33649 - DNA, 1442 bp, Arabidopsis thaliana
  misc_feature (1)..(1442): Ceres Seq. ID no. 13603748
ctgaattaggatactgtgtggtgttttgcaaaactgctcttgtgctatgactctggctaatgatttcggatattcgaccgctatgtcttcatcttattcagctcttcatactagtgtagaagacagataccacaagttgcctaactctttttgggtttcatcaggtcaggaactgatgaataaccctgtaccgtgtcagtcggtctctggtggcaattctggtggttatttgtttccttcttcctctggatactgcaatgtttcagctgtcttgcctcatggaaggaatttgcaaaaccagccacctgtttccaccgtgcctagagacagattggctatgcaggattgtcctttgatagctcaatcctcgttgattaatcatcaccctcaagagttcatagatccacttcatgagttctttgatttctctgatcatgttcctgttcagaatctacaagcagagagtagtggagtaagggtggactcatccgtggaacttcataagaaaagtgaatggcaagattgggcagatcagctgatttctgttgacgatggttctgagccaaattggtctgaacttcttggagattcaagttcccacaatccaaattcagagatacctacaccatttttggatgtaccaaggctagatataacagctaaccagcagcaacagatggtttcatcagaggaccagctcagcggcagaaactcatcatctagtgtagcaacatctaaacaacgtatgcgttggacaccagaacttcacgaggcattcgttgaagctgttaatcagcttggtggtagtgaacgagccacccctaaggctgttttgaagctcttgaataaccctggcttgaccatttatcatgtaaaaagccatttgcagaaatatagaacggcaaggtataaaccggagacttcggaagttacaggagaacctcaagagaagaagatgacatctattgaagatatcaaatctcttgacatgaaaacgagcgttgagatcacacaagctctacggttacaaatggaagtgcagaaacgtctccacgagcagctcgagatccaacggtcactgcagttacagattgaaaaacagggccggtacctacagatgatgttcgagaaacaacaaaagatacaagacaacaagagctcttcttcagaagcatcaccaaagcaatgcaatggttcatttgcagaagttgaagttggtcttgagacactaacaggggaccaaaatgaatctgcttcagcatcaaggaaacgtgtcagagaagattaaagcatgtttaatttgatctcgtttgacgaaacatgtttattgggaattaattgtggaaaccaactccagttttgttaaaagaatctgtttctttcttagctctgtattgttctagtttagaagcagttgatttggccttgcatggctgcaacac

SEQ ID NO: 33650 - protein, 413 aa, Arabidopsis thaliana
  misc_feature (1)..(413): Ceres Seq. ID no. 13603749
MTLANDFGYSTAMSSSYSALHTSVEDRYHKLPNSFWVSSGQELMNNPVPCQSVSGGNSGGYLFPSSSGYCNVSAVLPHGRNLQNQPPVSTVPRDRLAMQDCPLIAQSSLINHHPQEFIDPLHEFFDFSDHVPVQNLQAESSGVRVDSSVELHKKSEWQDWADQLISVDDGSEPNWSELLGDSSSHNPNSEIPTPFLDVPRLDITANQQQQMVSSEDQLSGRNSSSSVATSKQRMRWTPELHEAFVEAVNQLGGSERATPKAVLKLLNNPGLTIYHVKSHLQKYRTARYKPETSEVTGEPQEKKMTSIEDIKSLDMKTSVEITQALRLQMEVQKRLHEQLEIQRSLQLQIEKQGRYLQMMFEKQQKIQDNKSSSSEASPKQCNGSFAEVEVGLETLTGDQNESASASRKRVRED

SEQ ID NO: 33651 - protein, 401 aa, Arabidopsis thaliana
  misc_feature (1)..(401): Ceres Seq. ID no. 13603750
MSSSYSALHTSVEDRYHKLPNSFWVSSGQELMNNPVPCQSVSGGNSGGYLFPSSSGYCNVSAVLPHGRNLQNQPPVSTVPRDRLAMQDCPLIAQSSLINHHPQEFIDPLHEFFDFSDHVPVQNLQAESSGVRVDSSVELHKKSEWQDWADQLISVDDGSEPNWSELLGDSSSHNPNSEIPTPFLDVPRLDITANQQQQMVSSEDQLSGRNSSSSVATSKQRMRWTPELHEAFVEAVNQLGGSERATPKAVLKLLNNPGLTIYHVKSHLQKYRTARYKPETSEVTGEPQEKKMTSIEDIKSLDMKTSVEITQALRLQMEVQKRLHEQLEIQRSLQLQIEKQGRYLQMMFEKQQKIQDNKSSSSEASPKQCNGSFAEVEVGLETLTGDQNESASASRKRVRED

SEQ ID NO: 33652 - protein, 370 aa, Arabidopsis thaliana
  misc_feature (1)..(370): Ceres Seq. ID no. 13603751
MNNPVPCQSVSGGNSGGYLFPSSSGYCNVSAVLPHGRNLQNQPPVSTVPRDRLAMQDCPLIAQSSLINHHPQEFIDPLHEFFDFSDHVPVQNLQAESSGVRVDSSVELHKKSEWQDWADQLISVDDGSEPNWSELLGDSSSHNPNSEIPTPFLDVPRLDITANQQQQMVSSEDQLSGRNSSSSVATSKQRMRWTPELHEAFVEAVNQLGGSERATPKAVLKLLNNPGLTIYHVKSHLQKYRTARYKPETSEVTGEPQEKKMTSIEDIKSLDMKTSVEITQALRLQMEVQKRLHEQLEIQRSLQLQIEKQGRYLQMMFEKQQKIQDNKSSSSEASPKQCNGSFAEVEVGLETLTGDQNESASASRKRVRED

SEQ ID NO: 33653 - DNA, 1325 bp, Arabidopsis thaliana
  misc_feature (1)..(1325): Ceres Seq. ID no. 13603755
atagttgcctagtttcttttagcggattcgttttcatgagattcgactcattctaatagaacttttgcgtgatacaaaaggtctgttttggatgattaggtagagataatatggaagaagaagatgatgaggttatggtcagagaggggctaatggcctctcaaagagaaatcttcagcatttctggtccaatccatttaacttccattgattggaataattcttatcatagaacctcggtggcatcatgtttggtacaagcagtgtacacattggaacgagacagacaacaaaacaggattggcctaaagtcacaagccaatcattggtgggagtttttcaacttcactttagccgaaaccctaatcgacgactcagacggatctatatacggcgccgttttcgaatacaaacatttcttctcctacaattaccatcacacccctcattcgaaaccacctcctcgtcacgtgattgctttccgtggcacgatcttgaaaccgcactctcggtcacgtgaccttaagctcgacctacgttgcatccgagactctctccatgatagcactcggttcgtgcatgccattcaggttattcaaagtgcggtggctaaaactggtaatgcagccgtgtggctcgccggacattctcttggagcagccgtggctttgcttgccgggaagattatgacaaggtctggttttcctcttgagagttacttattcaatcctcctttctcgtctattccgatagagaagctagtgaagagtgagaagcttaaacatggggttcgattcgccggaagtcttgttaaagccggagttgccatcgccgttaagggtcgccaccataataagggtcaagaagacgattcgttcatgaagttagcatcatggataccatatttgtatttgaatccgttagatacaatatgctcagaatacattggttacttcaagcacagaaacaaaatgtttgagatcggagccggtaaaatcgaaagaattgctacgaggaactcacttaggagtctgttgtcaggaggaggaggaggaggttcatcttcagattcttcttcagagcctcttcatcttttaccatcggcatatatgacgataaacgctagcaaatcgccgaattttaagagagctcatgggattcatcaatggtgggatcccatgtttaatggtgaatatgttttgcatcagtttaataactaacttctacttttgttgcttcaaatgctttgaaacctttttttttattttttgttttgtttataattgtaatctgtgaaagatgaaatttgctgcaggttttgatgg

SEQ ID NO: 33654 - protein, 369 aa, Arabidopsis thaliana
  misc_feature (1)..(369): Ceres Seq. ID no. 13603756
MEEEDDEVMVREGLMASQREIFSISGPIHLTSIDWNNSYHRTSVASCLVQAVYTLERDRQQNRIGLKSQANHWWEFFNFTLAETLIDDSDGSIYGAVFEYKHFFSYNYHHTPHSKPPPRHVIAFRGTILKPHSRSRDLKLDLRCIRDSLHDSTRFVHAIQVIQSAVAKTGNAAVWLAGHSLGAAVALLAGKIMTRSGFPLESYLFNPPFSSIPIEKLVKSEKLKHGVRFAGSLVKAGVAIAVKGRHHNKGQEDDSFMKLASWIPYLYLNPLDTICSEYIGYFKHRNKMFEIGAGKIERIATRNSLRSLLSGGGGGGSSSDSSSEPLHLLPSAYMTINASKSPNFKRAHGIHQWWDPMFNGEYVLHQFNN

SEQ ID NO: 33655 - protein, 361 aa, Arabidopsis thaliana
  misc_feature (1)..(361): Ceres Seq. ID no. 13603757
MVREGLMASQREIFSISGPIHLTSIDWNNSYHRTSVASCLVQAVYTLERDRQQNRIGLKSQANHWWEFFNFTLAETLIDDSDGSIYGAVFEYKHFFSYNYHHTPHSKPPPRHVIAFRGTILKPHSRSRDLKLDLRCIRDSLHDSTRFVHAIQVIQSAVAKTGNAAVWLAGHSLGAAVALLAGKIMTRSGFPLESYLFNPPFSSIPIEKLVKSEKLKHGVRFAGSLVKAGVAIAVKGRHHNKGQEDDSFMKLASWIPYLYLNPLDTICSEYIGYFKHRNKMFEIGAGKIERIATRNSLRSLLSGGGGGGSSSDSSSEPLHLLPSAYMTINASKSPNFKRAHGIHQWWDPMFNGEYVLHQFNN

SEQ ID NO: 33656 - protein, 355 aa, Arabidopsis thaliana
  misc_feature (1)..(355): Ceres Seq. ID no. 13603758
MASQREIFSISGPIHLTSIDWNNSYHRTSVASCLVQAVYTLERDRQQNRIGLKSQANHWWEFFNFTLAETLIDDSDGSIYGAVFEYKHFFSYNYHHTPHSKPPPRHVIAFRGTILKPHSRSRDLKLDLRCIRDSLHDSTRFVHAIQVIQSAVAKTGNAAVWLAGHSLGAAVALLAGKIMTRSGFPLESYLFNPPFSSIPIEKLVKSEKLKHGVRFAGSLVKAGVAIAVKGRHHNKGQEDDSFMKLASWIPYLYLNPLDTICSEYIGYFKHRNKMFEIGAGKIERIATRNSLRSLLSGGGGGGSSSDSSSEPLHLLPSAYMTINASKSPNFKRAHGIHQWWDPMFNGEYVLHQFNN

SEQ ID NO: 33657 - DNA, 1911 bp, Arabidopsis thaliana
  misc_feature (1)..(1911): Ceres Seq. ID no. 13603759
atttaaaaaagaaaaaagaagaaaagagagagagagactcacaaatcataatatctccttcattaactcataatcactttaaagaacattggaatcagattcattacatagggattgatatggaaaagtcaaaccaaccagttcatgtaaccttgtccgaattgaaggacggagataaagaaatcgttgatgctgaatttttggttgatcttcttgagagctatagatttggtaaagataatgttcccgcccgagaatttcgatccaaggcggcagcgacggctccggcgccggtcaacaccaccgagatagagttggaagaggataatgatggatctcaagctcaaggtaacaattctgttagtgaaagtacatcatcgctattttccgattcagatccaatagtacttgagagtactgtgagcgaaaccggttcaaacgaagaatctgaaaccggttcaaacgaagaaaatggtaataattggttagagtcgagctccacaaacttgccaaatgtagagaacaaaaggcaacggaatggagaagattgtgagatagaagaggaagaagaaaataacgagagatcattatcggattcagaagagaagtcaaacctagagaagttgcttgggacacaagaaaactatgagcttggaaatgaggatgaagaaaagaacgagagatcatcgtcagattcagaagagaagtcaaacctagagaatttgcttgcgacacaagaaaactacgagctttactgtcctagctgtagcacatgtatcaccagaaatgtggttctcaagaaaagaaaacgagggaagcacgttaattcatctctggatctgaaacccgatataccggttgttgaaccggacgaaccaagcgacattgaggagatggaatcaccagttaaggtttatgtccctgagactcggattgaggatgatcaagaagataaagagggaactatctttacttgcttggtttgtgatctaaagtacttcatccggttaggaacaaagttcttacaacttgattatatcaggggaaaaccggttgagaaatcagttgaagaatatatagatgtgaggaagagtataaacaccacacaatcaccaccacaaattcaaccggacggagaaagattcgccattgagttgttaaagagcaccgtctacggcggtctcactgagaccatcaccagcctcggcgttgtatcatctgcttctgcctctggttcctccaccatgaatatattggctcttgctgtcgcaaatttggccggtgggctcatcgtcctcgctcaaaactttcaagatctaagaaacagttcagatcaagagaaagataggtacgaggaattgttagggagacgtactaaatcccggatacatatcttagtagcggtcatgtcttacattttcttcggcctaattcctccgttagtttacgcattttccttctacgaaaccggaatcaagaactacaagctcatctcggttttcttgggttctctggtttgcgtaattttgctcggttcgatcaaggtctatgtccgaaaaccaaccaattcatgtggatcgactaaagcttatctcaaatctgcggcttattatacgtctattgttgttgcttcttgcggaatctcatacgttgtcggagatattatgggagagtatatcgagaagctcagtttggttggtttagaccagatcagtataacttcaccatgttatggaattaaacccgaggagtgccggtttacttccttttaatatacagtgggactaagaaccggtctgaccaacgttgtataatttctgttctaattacttactaaatctctgtatcttttctagtaaaaaatcaaaactaatgctttcatagaataaatgtgttttgaggtttttcttt

SEQ ID NO: 33658 - protein, 589 aa, Arabidopsis thaliana
  misc_feature (1)..(589): Ceres Seq. ID no. 13603760
LKKKKEEKRERDSQIIISPSLTHNHFKEHWNQIHYIGIDMEKSNQPVHVTLSELKDGDKEIVDAEFLVDLLESYRFGKDNVPAREFRSKAAATAPAPVNTTEIELEEDNDGSQAQGNNSVSESTSSLFSDSDPIVLESTVSETGSNEESETGSNEENGNNWLESSSTNLPNVENKRQRNGEDCEIEEEEENNERSLSDSEEKSNLEKLLGTQENYELGNEDEEKNERSSSDSEEKSNLENLLATQENYELYCPSCSTCITRNVVLKKRKRGKHVNSSLDLKPDIPVVEPDEPSDIEEMESPVKVYVPETRIEDDQEDKEGTIFTCLVCDLKYFIRLGTKFLQLDYIRGKPVEKSVEEYIDVRKSINTTQSPPQIQPDGERFAIELLKSTVYGGLTETITSLGVVSSASASGSSTMNILALAVANLAGGLIVLAQNFQDLRNSSDQEKDRYEELLGRRTKSRIHILVAVMSYIFFGLIPPLVYAFSFYETGIKNYKLISVFLGSLVCVILLGSIKVYVRKPTNSCGSTKAYLKSAAYYTSIVVASCGISYVVGDIMGEYIEKLSLVGLDQISITSPCYGIKPEECRFTSF

SEQ ID NO: 33659 - protein, 550 aa, Arabidopsis thaliana
  misc_feature (1)..(550): Ceres Seq. ID no. 13603761
MEKSNQPVHVTLSELKDGDKEIVDAEFLVDLLESYRFGKDNVPAREFRSKAAATAPAPVNTTEIELEEDNDGSQAQGNNSVSESTSSLFSDSDPIVLESTVSETGSNEESETGSNEENGNNWLESSSTNLPNVENKRQRNGEDCEIEEEEENNERSLSDSEEKSNLEKLLGTQENYELGNEDEEKNERSSSDSEEKSNLENLLATQENYELYCPSCSTCITRNVVLKKRKRGKHVNSSLDLKPDIPVVEPDEPSDIEEMESPVKVYVPETRIEDDQEDKEGTIFTCLVCDLKYFIRLGTKFLQLDYIRGKPVEKSVEEYIDVRKSINTTQSPPQIQPDGERFAIELLKSTVYGGLTETITSLGVVSSASASGSSTMNILALAVANLAGGLIVLAQNFQDLRNSSDQEKDRYEELLGRRTKSRIHILVAVMSYIFFGLIPPLVYAFSFYETGIKNYKLISVFLGSLVCVILLGSIKVYVRKPTNSCGSTKAYLKSAAYYTSIVVASCGISYVVGDIMGEYIEKLSLVGLDQISITSPCYGIKPEECRFTSF

SEQ ID NO: 33660 - DNA, 2218 bp, Arabidopsis thaliana
  misc_feature (1)..(2218): Ceres Seq. ID no. 13603773
agtggtcttcatttaacaaacgccttctctcttttttcctttaaatctctgagctcttttttcttcatttgtttttttgccaaaaaaaaatatatatattgaatcttcattcattaaaaaaacaatttttatttttccctattcatcttcggttcctcaccgtccgatgctttgactctgaccaatcagtcaatttgagcttcacaatcaacggtcatgggtcattgttacagccggaacatctccgccgtcgaggacgacgagatccccaccggtaacggcgaggtttcgaatcaaccatctcaaaatcaccggcatgcttcgattcctcagtctccggttgcttctggtactcctgaagtcaactcatataacattagccctttccaaagcccgttaccggcgggagtagctccatcaccggcgagaactccgggacggaagttcaaatggccgtttcctccaccgtcacctgcgaaaccgattatggcggctttgagacgacgacgtggcgctccgcctcagcctcgagatgagccgatcccggaggatagtgaagatgtagtagatcacggtggtgacagtggcggcggagagaggttagataagaatttcgggtttgggaagaacttcgaagggaagtatgagttagggaaagaagtagggcgagggcattttggtcatacttgttgggcaaaagcgaagaaaggcaagatgaagaaccaaaccgtggctgtcaaaatcatctctaaagctaagatgacgtcgacgttatctattgaagatgttcgtagagaagtgaaattgctgaaagctttatcagggcataggcatatggttaagttctatgatgtatatgaggatgctgataatgtctttgttgttatggagttatgcgaaggtggagagctattggatagaattttggcgagaggtggacgataccctgaagtcgatgccaaacgtattcttgtgcagattttgtctgcaacagcattttttcaccttcaaggtgtcgtgcaccgtgatctgaagccggagaattttctctttaccagcagaaatgaggatgcgatactcaaggtcatagattttggcttgtctgatttcattagatacgatcagcgtctcaatgatgttgtaggaagtgcatactatgttgcacctgaagtactccataggtcttacagcactgaagcagatatgtggagcatcggtgtcataagttacatacttctctgtggaagcagacctttctatggaagaactgagtctgcaatattccgttgtgtgcttagagcaaaccctaattttgaggatatgccttggccttctatatctcctactgccaaagacttcgtgaaaaggcttttgaacaaggaccataggaaacgaatgacagctgctcaagctctagctcatccgtggttacgtgacgaaaaccccggtttgcttcttgatttctcggtctacaagttggtcaagtcctatatccgtgcctcacctttccgacgatcagcacttaaggctctctcgaaagctatacctgatgaagaacttgtgttccttaaggcacagttcatgctcctggatcctaaagacggaggcctatcccttaactgtttcacaatggctttaacaagatatgctactgatgctatgatggaatcaaggcttcctgacattttaaatacgatgcaacctctggcgcaaaagaagcttgactttgaagagttctgtgcggctgcggtcagtgtttaccaactggaggctcttgaagaatgggaacagattgcaacttcagcatttgagcactttgaacatgaaggaaaccgaatcatatctgtccaagaactcgccggggagatgagcgtgggaccgagtgcatatcctctgctcaaggattggatccgaagttcggatggaaagctgagtttcttggggtacgctaagttcttgcatggtgtgaccgtacgaagctcaagctcgagacctaggtgacacaccatgatgtaaaaagtcttctaacatgtgaattgagtttcaagaaacatcctaaacaatgtcgtcgtcagagaccttggattcaaagattaaaaaaaaaaacttgaaatggaagtgaagtcaggtaggtatttcctttgtaaatgattctttgagcattttgttttcgaaacaaactaaaaaaggaaaaacatattatatatgttatagaagg

SEQ ID NO: 33661 - protein, 594 aa, Arabidopsis thaliana
  misc_feature (1)..(594): Ceres Seq. ID no. 13603774
MGHCYSRNISAVEDDEIPTGNGEVSNQPSQNHRHASIPQSPVASGTPEVNSYNISPFQSPLPAGVAPSPARTPGRKFKWPFPPPSPAKPIMAALRRRRGAPPQPRDEPIPEDSEDVVDHGGDSGGGERLDKNFGFGKNFEGKYELGKEVGRGHFGHTCWAKAKKGKMKNQTVAVKIISKAKMTSTLSIEDVRREVKLLKALSGHRHMVKFYDVYEDADNVFVVMELCEGGELLDRILARGGRYPEVDAKRILVQILSATAFFHLQGVVHRDLKPENFLFTSRNEDAILKVIDFGLSDFIRYDQRLNDVVGSAYYVAPEVLHRSYSTEADMWSIGVISYILLCGSRPFYGRTESAIFRCVLRANPNFEDMPWPSISPTAKDFVKRLLNKDHRKRMTAAQALAHPWLRDENPGLLLDFSVYKLVKSYIRASPFRRSALKALSKAIPDEELVFLKAQFMLLDPKDGGLSLNCFTMALTRYATDAMMESRLPDILNTMQPLAQKKLDFEEFCAAAVSVYQLEALEEWEQIATSAFEHFEHEGNRIISVQELAGEMSVGPSAYPLLKDWIRSSDGKLSFLGYAKFLHGVTVRSSSSRPR

SEQ ID NO: 33662 - protein, 504 aa, Arabidopsis thaliana
  misc_feature (1)..(504): Ceres Seq. ID no. 13603775
MAALRRRRGAPPQPRDEPIPEDSEDVVDHGGDSGGGERLDKNFGFGKNFEGKYELGKEVGRGHFGHTCWAKAKKGKMKNQTVAVKIISKAKMTSTLSIEDVRREVKLLKALSGHRHMVKFYDVYEDADNVFVVMELCEGGELLDRILARGGRYPEVDAKRILVQILSATAFFHLQGVVHRDLKPENFLFTSRNEDAILKVIDFGLSDFIRYDQRLNDVVGSAYYVAPEVLHRSYSTEADMWSIGVISYILLCGSRPFYGRTESAIFRCVLRANPNFEDMPWPSISPTAKDFVKRLLNKDHRKRMTAAQALAHPWLRDENPGLLLDFSVYKLVKSYIRASPFRRSALKALSKAIPDEELVFLKAQFMLLDPKDGGLSLNCFTMALTRYATDAMMESRLPDILNTMQPLAQKKLDFEEFCAAAVSVYQLEALEEWEQIATSAFEHFEHEGNRIISVQELAGEMSVGPSAYPLLKDWIRSSDGKLSFLGYAKFLHGVTVRSSSSRPR

SEQ ID NO: 33663 - protein, 428 aa, Arabidopsis thaliana
  misc_feature (1)..(428): Ceres Seq. ID no. 13603776
MKNQTVAVKIISKAKMTSTLSIEDVRREVKLLKALSGHRHMVKFYDVYEDADNVFVVMELCEGGELLDRILARGGRYPEVDAKRILVQILSATAFFHLQGVVHRDLKPENFLFTSRNEDAILKVIDFGLSDFIRYDQRLNDVVGSAYYVAPEVLHRSYSTEADMWSIGVISYILLCGSRPFYGRTESAIFRCVLRANPNFEDMPWPSISPTAKDFVKRLLNKDHRKRMTAAQALAHPWLRDENPGLLLDFSVYKLVKSYIRASPFRRSALKALSKAIPDEELVFLKAQFMLLDPKDGGLSLNCFTMALTRYATDAMMESRLPDILNTMQPLAQKKLDFEEFCAAAVSVYQLEALEEWEQIATSAFEHFEHEGNRIISVQELAGEMSVGPSAYPLLKDWIRSSDGKLSFLGYAKFLHGVTVRSSSSRPR

SEQ ID NO: 33664 - DNA, 1326 bp, Arabidopsis thaliana
  misc_feature (1)..(1326): Ceres Seq. ID no. 13603780
actcaaagtcgagccttccttcctttatctcttataccctttttgattcttcttcaattttctgacatcaaatggcggcaaagctgatatccaccggtttccgtcatactactttgccggaaaactatgtccggccaatctccgaccgtccacgtctctctgaagtctctcaactcgaagatttccctctcatcgatctctcttccactgatcgatcttttctcatccaacaaatccaccaagcttgtgcccgattcggattttttcaggtcataaatcacggagttaacaaacaaataatagatgagatggtgagtgttgcgcgtgagttctttagcatgtctatggaagaaaaaatgaagctatattcagacgatccaacgaagacaacaagattatcgacgagcttcaatgtgaagaaagaagaagtcaacaattggagagactatctaagactccattgttatcctatccacaagtatgtcaatgagtggccgtcaaaccctccttctttcaaggaaatagtaagtaaatacagtagagaagtaagagaagtgggatttaaaatagaggaattaatatcagagagcttaggtttagaaaaagattacatgaagaaagtgcttggtgaacaaggtcaacacatggcagtcaactattatcctccatgtcctgaacctgagctcacttacggtttacctgctcataccgacccaaacgccctaaccattcttcttcaagacactactgtttgcggtctccagatcttgatcgacggtcagtggttcgccgttaatccacatcctgatgcttttgtcatcaacataggtgaccagttacaggcattaagtaatggagtatacaaaagtgtttggcatcgcgctgtaacaaacacagaaaatccgagactatcggtcgcatcgtttctgtgcccagctgactgtgctgtcatgagcccggccaagcccttgtgggaagctgaggacgatgaaacgaaaccagtctacaaagatttcacttatgcagagtattacaagaagttttggagtaggaatctggaccaagaacattgcctcgagaattttctaaacaactaagatacatatatctttggcctttgtgtttgtctagtaggcatatatatacaagtcaataacagcattgatgttcgattctacattcctaccaacattttgttctagacgtatgataatagtaggaatcatgatcatatgtcttgataataactatcatgggcatatttgtttgtgtgttaaataatttcttaccttttatttttctatatgcttcaaaacttttaacttt

SEQ ID NO: 33665 - protein, 341 aa, Arabidopsis thaliana
  misc_feature (1)..(341): Ceres Seq. ID no. 13603781
MAAKLISTGFRHTTLPENYVRPISDRPRLSEVSQLEDFPLIDLSSTDRSFLIQQIHQACARFGFFQVINHGVNKQIIDEMVSVAREFFSMSMEEKMKLYSDDPTKTTRLSTSFNVKKEEVNNWRDYLRLHCYPIHKYVNEWPSNPPSFKEIVSKYSREVREVGFKIEELISESLGLEKDYMKKVLGEQGQHMAVNYYPPCPEPELTYGLPAHTDPNALTILLQDTTVCGLQILIDGQWFAVNPHPDAFVINIGDQLQALSNGVYKSVWHRAVTNTENPRLSVASFLCPADCAVMSPAKPLWEAEDDETKPVYKDFTYAEYYKKFWSRNLDQEHCLENFLNN

SEQ ID NO: 33666 - protein, 262 aa, Arabidopsis thaliana
  misc_feature (1)..(262): Ceres Seq. ID no. 13603782
MVSVAREFFSMSMEEKMKLYSDDPTKTTRLSTSFNVKKEEVNNWRDYLRLHCYPIHKYVNEWPSNPPSFKEIVSKYSREVREVGFKIEELISESLGLEKDYMKKVLGEQGQHMAVNYYPPCPEPELTYGLPAHTDPNALTILLQDTTVCGLQILIDGQWFAVNPHPDAFVINIGDQLQALSNGVYKSVWHRAVTNTENPRLSVASFLCPADCAVMSPAKPLWEAEDDETKPVYKDFTYAEYYKKFWSRNLDQEHCLENFLNN

SEQ ID NO: 33667 - protein, 252 aa, Arabidopsis thaliana
  misc_feature (1)..(252): Ceres Seq. ID no. 13603783
MSMEEKMKLYSDDPTKTTRLSTSFNVKKEEVNNWRDYLRLHCYPIHKYVNEWPSNPPSFKEIVSKYSREVREVGFKIEELISESLGLEKDYMKKVLGEQGQHMAVNYYPPCPEPELTYGLPAHTDPNALTILLQDTTVCGLQILIDGQWFAVNPHPDAFVINIGDQLQALSNGVYKSVWHRAVTNTENPRLSVASFLCPADCAVMSPAKPLWEAEDDETKPVYKDFTYAEYYKKFWSRNLDQEHCLENFLNN

SEQ ID NO: 33668 - DNA, 1035 bp, Arabidopsis thaliana
  misc_feature (1)..(1035): Ceres Seq. ID no. 13603791
aaacatcacaaactaaacaataaaccataccataaaaaacatgaaaatcctctcactttcacttctcttgctcttggccgctacggtctcggcatccgttccagggctcatcgaactcgtcgattcgaaaaccatctttgggaacgtagccgaactcttagagaaagagaaactttccatcaactacgccaactgcagaagctggcaccttggtgttgagacctctaacatcatagacttcgacacggtgcccgcaaattgcaaagactatgttgaagactacttgatcacttccaaacagtaccaatacgactccaaaaccgtgtgcaaagaggcttatttctatgccaaaggacttgccctaaagaacgacaccgtcaatgtttggatctttgacctagatgataccctcctctctagtattccctactacgcaaaatatggatacggaacagagaagaccgacccgggggcgtactggttgtggttagggaccggagcatcaacccctggactcccggaggccttgcatctttaccaaaacatcatagagctcgggattgaacccatcatactcagtgaccgttggaagttgtggaagaatgtcactctcgacaatctcgaagctgctggcgtgacctactggaagcatctcatattgaagcctaatggttcgaacttgaggcaagtggtgtacaagtcaaaggtgaggaagagtctcgtgaagaaaggatacaacatcgttggcaatatcggagatcaatgggctgatttggttgaggatacccctgggagggtttttaagctcccaaatccactctactacgtaccttcttaagaatctatcttcatcgcattgtccccttgtatacacttcatatctatgtcgtttcgtttatctttgtagccgttttggcaccgctgcataaataaaatgtctatcctatcgtaacttaataagtacaaagacttcgtactaaatgttgtttttctttaaaggggtcattaattaagtggccatgaaatgatattcac

SEQ ID NO: 33669 - protein, 265 aa, Arabidopsis thaliana
  misc_feature (1)..(265): Ceres Seq. ID no. 13603792
MKILSLSLLLLLAATVSASVPGLIELVDSKTIFGNVAELLEKEKLSINYANCRSWHLGVETSNIIDFDTVPANCKDYVEDYLITSKQYQYDSKTVCKEAYFYAKGLALKNDTVNVWIFDLDDTLLSSIPYYAKYGYGTEKTDPGAYWLWLGTGASTPGLPEALHLYQNIIELGIEPIILSDRWKLWKNVTLDNLEAAGVTYWKHLILKPNGSNLRQVVYKSKVRKSLVKKGYNIVGNIGDQWADLVEDTPGRVFKLPNPLYYVPS

SEQ ID NO: 33670 - DNA, 965 bp, Arabidopsis thaliana
  misc_feature (1)..(965): Ceres Seq. ID no. 13603793
aaacaccataaactaaacaataaaccatacaaaaaaatatgaaaatcctctcactttcactactcttgctcttggccgctacggtctcccacgtccagtcttcggcatccgttccagggctcatcgaactcctcgaatcgaacaccatctttgggaacgaagccgaactcttagagaaagagggactgtccatcaactaccccaactgcagaagctggcaccttggtgttgagacctctaacatcataaacttcgacacggtgcccgcaaattgcaaagcctatgttgaagactacttgatcacttccaaacagtaccaatacgactccaaaactgtaaacaaagaggcatatttttacgccaaaggacttgccctaaagaacgataccgtcaatgtttggatctttgacctagacgacactctcctctctagtattccctactacgctaaatatggatatgggaccgagaacacagccccgggggcgtactggtcgtggttagagtccggagaatcaactccaggactcccggagaccttgcatctatacgaaaacctcttggaactcgggattgaacccatcataatctctgacagatggaaaaaattgtcagaagtcactgtcgagaatctcaaggctgttggtgtaacaaaatggaagcatctcatactcaagccaaacggatcgaagttgacgcaagtggtgtacaagtcaaaggttaggaatagccttgtgaagaaagggtacaacatcgttgggaatattggagaccaatgggctgatttggttgaggatactcctggaagggtttttaagctcccaaatccactctactacgtaccttcttaattaagcatctatcttcatggcattgtccccttgtatccatttcatatctatgtcgtttcgtttatctttgtagccgttttggcaccactgcttaaataaaatgccaatcctatc

SEQ ID NO: 33671 - protein, 270 aa, Arabidopsis thaliana
  misc_feature (1)..(270): Ceres Seq. ID no. 13603794
MKILSLSLLLLLAATVSHVQSSASVPGLIELLESNTIFGNEAELLEKEGLSINYPNCRSWHLGVETSNIINFDTVPANCKAYVEDYLITSKQYQYDSKTVNKEAYFYAKGLALKNDTVNVWIFDLDDTLLSSIPYYAKYGYGTENTAPGAYWSWLESGESTPGLPETLHLYENLLELGIEPIIISDRWKKLSEVTVENLKAVGVTKWKHLILKPNGSKLTQVVYKSKVRNSLVKKGYNIVGNIGDQWADLVEDTPGRVFKLPNPLYYVPS

SEQ ID NO: 33672 - DNA, 1134 bp, Arabidopsis thaliana
  misc_feature (1)..(1134): Ceres Seq. ID no. 13603810
aacaaaaatcgtttcgttcttttccaaaatccccaaacaatagaaacgcgttttaaacgatttgattagttttaaattaaaaagaagatccgagcgatgtctggttcgacccggaaagaaatggatcggatcaaaggaccatggagtcctgaagaagacgatctgttacaatcgttggttcagaagcacggaccaaggaactggtctctgataagcaaatcaatccctggacgttccggtaaatcttgccgtctccgttggtgtaatcagctttctccggaggtagagcaccgtggattcacggcggaggaagatgatacgattatactagcgcacgctcggtttggtaacaagtgggcgacgattgcacggcttctcaatggtcgcactgataacgcgattaagaatcactggaactcaacgctgaagcggaaatgtagcggcggaggcggcggaggagaggaagggcagagttgtgatttcggtggtaatggagggtatgatggtaatttaactgatgaaaaaccgttaaaacggagggcgagtggtggaggaggagttgttgtggtgacggcgttaagtccaacgggatctgacgtcagcgagcaatcgcaatctagtggatctgttttaccggtttcttcttcttgtcatgtttttaaaccgacggcgagagctggtggagtggtgattgagtcatcatcgccggaggaggaggagaaagatccgatgacttgtttgaggttgtctttgccttgggtcaatgagtcaacaactccaccggagttgtttccggtgaagagagaagaagaagaagagaaggaaagagagatttctggacttggtggagattttatgacggtggtgcaggagatgattaagacggaggttaggagttacatggcggatttacagctaggaaacggcggaggagctggaggaggagcaagttcgtgtatggtgcaaggaactaatggtcgtaatgtagggtttagagagtttattggattaggtaggatcgagtagtgagtgagaaaagagaagaattgtgtagcaaatgcagagaaagagccaatttcatgatttgagatttgattcattcgaaaaaaaaactgaataaatgtattgattttg

SEQ ID NO: 33673 - protein, 309 aa, Arabidopsis thaliana
  misc_feature (1)..(309): Ceres Seq. ID no. 13603811
MSGSTRKEMDRIKGPWSPEEDDLLQSLVQKHGPRNWSLISKSIPGRSGKSCRLRWCNQLSPEVEHRGFTAEEDDTIILAHARFGNKWATIARLLNGRTDNAIKNHWNSTLKRKCSGGGGGGEEGQSCDFGGNGGYDGNLTDEKPLKRRASGGGGVVVVTALSPTGSDVSEQSQSSGSVLPVSSSCHVFKPTARAGGVVIESSSPEEEEKDPMTCLRLSLPWVNESTTPPELFPVKREEEEEKEREISGLGGDFMTVVQEMIKTEVRSYMADLQLGNGGGAGGGASSCMVQGTNGRNVGFREFIGLGRIE

SEQ ID NO: 33674 - protein, 301 aa, Arabidopsis thaliana
  misc_feature (1)..(301): Ceres Seq. ID no. 13603812
MDRIKGPWSPEEDDLLQSLVQKHGPRNWSLISKSIPGRSGKSCRLRWCNQLSPEVEHRGFTAEEDDTIILAHARFGNKWATIARLLNGRTDNAIKNHWNSTLKRKCSGGGGGGEEGQSCDFGGNGGYDGNLTDEKPLKRRASGGGGVVVVTALSPTGSDVSEQSQSSGSVLPVSSSCHVFKPTARAGGVVIESSSPEEEEKDPMTCLRLSLPWVNESTTPPELFPVKREEEEEKEREISGLGGDFMTVVQEMIKTEVRSYMADLQLGNGGGAGGGASSCMVQGTNGRNVGFREFIGLGRIE

SEQ ID NO: 33675 - DNA, 939 bp, Arabidopsis thaliana
  misc_feature (1)..(939): Ceres Seq. ID no. 13603821
aaaaagtacgaaaggaaaatatgagtgaggagaagaggaagcaacacttcgtgctagtacatggtgcgtgccacggcgcatggtgctggtacaaggttaagcctcttctcgaggctttgggccatcgtgtaaccgccttagacctagctgcttccggtatagacacaaccaggtcaatcactgacatttctacatgtgaacaatattctgagccattgatgcagctaatgacttcattgccgaatgatgagaaggttgtactcgttggtcatagctttggaggtttgagtttagccttagccatggataagtttcccgataaaatctctgtctctgtcttcgtgactgcattcatgcccgacaccaaacactcaccatcgttcgtcgaggaaaagtttgcaagcagcatgacaccagaaggatggatgggctctgagctcgagacatatggttcagataattccggcttgtctgtgttcttcagcaccgacttcatgaagcaccgtctctaccaactttctcctgtggaggatcttgagcttggattgcttctaaagaggcctagttcattgtttattaatgaattatcgaagatggagaacttttctgagaaagggtatggatctgttcctcgagcttacattgtgtgcaaagaggacaacattatctcggaagaccatcaacgatggatgatccataattatccggcgaatttagtgattgagatggaagagactgatcatatgccaatgttttgcaaacctcaactactaagtgaccatctattggcaatcgctgacaatttctgttaaataatattttgatgaaaatgtatttggagtggatacaatcaaacgtgttctaaaatggatcttcataaaggttcaaacttatttcttagttcttactatggttgaaatgagaaacctaagtcaatct

SEQ ID NO: 33676 - protein, 269 aa, Arabidopsis thaliana
  misc_feature (1)..(269): Ceres Seq. ID no. 13603822
KVRKENMSEEKRKQHFVLVHGACHGAWCWYKVKPLLEALGHRVTALDLAASGIDTTRSITDISTCEQYSEPLMQLMTSLPNDEKVVLVGHSFGGLSLALAMDKFPDKISVSVFVTAFMPDTKHSPSFVEEKFASSMTPEGWMGSELETYGSDNSGLSVFFSTDFMKHRLYQLSPVEDLELGLLLKRPSSLFINELSKMENFSEKGYGSVPRAYIVCKEDNIISEDHQRWMIHNYPANLVIEMEETDHMPMFCKPQLLSDHLLAIADNFC

SEQ ID NO: 33677 - protein, 263 aa, Arabidopsis thaliana
  misc_feature (1)..(263): Ceres Seq. ID no. 13603823
MSEEKRKQHFVLVHGACHGAWCWYKVKPLLEALGHRVTALDLAASGIDTTRSITDISTCEQYSEPLMQLMTSLPNDEKVVLVGHSFGGLSLALAMDKFPDKISVSVFVTAFMPDTKHSPSFVEEKFASSMTPEGWMGSELETYGSDNSGLSVFFSTDFMKHRLYQLSPVEDLELGLLLKRPSSLFINELSKMENFSEKGYGSVPRAYIVCKEDNIISEDHQRWMIHNYPANLVIEMEETDHMPMFCKPQLLSDHLLAIADNFC

SEQ ID NO: 33678 - protein, 197 aa, Arabidopsis thaliana
  misc_feature (1)..(197): Ceres Seq. ID no. 13603824
MQLMTSLPNDEKVVLVGHSFGGLSLALAMDKFPDKISVSVFVTAFMPDTKHSPSFVEEKFASSMTPEGWMGSELETYGSDNSGLSVFFSTDFMKHRLYQLSPVEDLELGLLLKRPSSLFINELSKMENFSEKGYGSVPRAYIVCKEDNIISEDHQRWMIHNYPANLVIEMEETDHMPMFCKPQLLSDHLLAIADNFC

SEQ ID NO: 33679 - DNA, 1208 bp, Arabidopsis thaliana
  misc_feature (1)..(1208): Ceres Seq. ID no. 13603825
aaatctcatttttgtctccttaaaattttctcagaaacatttccgtcatttgttccttagttttgtaatcaatcttcacgattcctcaggtaccatcctccaaggtcataagagaacaggatcggtgttctcgaacgagcggtgttgtgtcttaagtggggatggcttcaacaccttgtgcagcatgtaagctcttgaggcgtaaatgcactcaagaatgtgtgtttgcgccgtattttccaccaactaatcctcaaaagtttatctttgttcaccgagtttttggagcaagcaatgtaaccaagatcctcaacgatcttccacctgatcaacgcgaagacactgttaattccctcttttatgaagcggaagcgcgtatccgtgacccaatctatggatgtgttggtctcatttcttttttacaacaatacctcaagaaaattcaacaagatcttctcactgctaaagaagagcttgttggttacttgggacccgatgctgtgattccgccgccttatcttcctcctataggtaacaatcctcctcccaatttcatgatgtctatggaaggaatgccaccaggagtgatccctcaaggagaacctttgatgatacgcgaaccaaacatgtctcagcaacatcatcatcaacaaccgcaagatgagcagttgcaattcatagcttctgatgcacagagaatggctgcaatgatgttggagagaggagatcaacaagggatgttcaatggttacggaatagacaacaatggttcggttacagccacgggttttaaccaaatggatgtgaatgatcaaggtgctggtggttcgttgtctggaccatctcttgctttaggaagctttggtgatgcttatcagatgggtcaagagacagagcatggtcatatcaaccatgatcagcttcagacacagcttatgcttcagcctccattacaagaaggtcaagaacaaacagaggaaggacagttcttgatgcaaccaatgggacaagagaatcttcatgacgaagaggaggaggaagagcttgagccaccggttaaatggaggatgtctgagaacaaggaagctagtttttaagacctaaatgcatttaggagaacaaaaaaaaattcctattttcttggatagtttacttaactcttgaggatctatttggtttttttttttaataatcaaatggtattattc

SEQ ID NO: 33680 - protein, 311 aa, Arabidopsis thaliana
  misc_feature (1)..(311): Ceres Seq. ID no. 13603826
MASTPCAACKLLRRKCTQECVFAPYFPPTNPQKFIFVHRVFGASNVTKILNDLPPDQREDTVNSLFYEAEARIRDPIYGCVGLISFLQQYLKKIQQDLLTAKEELVGYLGPDAVIPPPYLPPIGNNPPPNFMMSMEGMPPGVIPQGEPLMIREPNMSQQHHHQQPQDEQLQFIASDAQRMAAMMLERGDQQGMFNGYGIDNNGSVTATGFNQMDVNDQGAGGSLSGPSLALGSFGDAYQMGQETEHGHINHDQLQTQLMLQPPLQEGQEQTEEGQFLMQPMGQENLHDEEEEEELEPPVKWRMSENKEASF

SEQ ID NO: 33681 - protein, 180 aa, Arabidopsis thaliana
  misc_feature (1)..(180): Ceres Seq. ID no. 13603827
MMSMEGMPPGVIPQGEPLMIREPNMSQQHHHQQPQDEQLQFIASDAQRMAAMMLERGDQQGMFNGYGIDNNGSVTATGFNQMDVNDQGAGGSLSGPSLALGSFGDAYQMGQETEHGHINHDQLQTQLMLQPPLQEGQEQTEEGQFLMQPMGQENLHDEEEEEELEPPVKWRMSENKEASF

SEQ ID NO: 33682 - protein, 179 aa, Arabidopsis thaliana
  misc_feature (1)..(179): Ceres Seq. ID no. 13603828
MSMEGMPPGVIPQGEPLMIREPNMSQQHHHQQPQDEQLQFIASDAQRMAAMMLERGDQQGMFNGYGIDNNGSVTATGFNQMDVNDQGAGGSLSGPSLALGSFGDAYQMGQETEHGHINHDQLQTQLMLQPPLQEGQEQTEEGQFLMQPMGQENLHDEEEEEELEPPVKWRMSENKEASF

SEQ ID NO: 33683 - DNA, 1066 bp, Arabidopsis thaliana
  misc_feature (1)..(1066): Ceres Seq. ID no. 13603840
aagactctgttttttcccaagatgtctggtttcctcttttgtttcgtccaaatctctactttttagggatcttgtccttctcttttctgctgattaaaaccctcgaatttgctccaattcgacgcgaaaaagggcattgagatggtgaatggagaatcatcaactagtacgtcttactctgatagtaacaatgacacaaatgatcaaggaggagactttgaatgtaacatttgtttcgaactagctcaagatccgattgtcactctctgtggccatctcttttgctggccttgcttataccgttggcttcaccaccattcacattctcaagaatgtccggtttgtaaagccgtggttcaagacgataagcttgttcctctttacggtagaggcaagaaccagactgacccgagatcaaaacgttatccgggtttacggattcctaaccgaccaacaggtcaaagacctgagactgctgctcctcctcctcagcctgaagctgcgagtaattttttcaactacggtattggtttgatgggtggaattatgccgatgatggcgactacgaggtttgggaatttcagtatggggtttggtggtttgttaccttctttgtttaactttcagtttcatggatttcatgatgctacgctttatggttcaacaccgggttatccttacggtggttatcataacggtttccgtggagttcctcctcgtggacaagagcgtcctatggctcgtggaggaaaccaaagtgatgcatttctgaagaatatcctcttttttgttggaatctgtgtggtgatatttctcatctggtgaaaacgaatcacatttggtgtatttccaggtatgatcaaacttacttacttggtgcaagttgtgtatgtaaatatggtaatagctgagtgtacttgtctgctatttcgacgttgttattgtatttttgttttgaagatgaaccgtgagtctacaagcttttttacacaactcttttgttgcttttgtgttttgtctaagcatcttgtgaaaactagttgtgaaataaatggtgcgtgttatg

SEQ ID NO: 33684 - protein, 227 aa, Arabidopsis thaliana
  misc_feature (1)..(227): Ceres Seq. ID no. 13603841
MVNGESSTSTSYSDSNNDTNDQGGDFECNICFELAQDPIVTLCGHLFCWPCLYRWLHHHSHSQECPVCKAVVQDDKLVPLYGRGKNQTDPRSKRYPGLRIPNRPTGQRPETAAPPPQPEAASNFFNYGIGLMGGIMPMMATTRFGNFSMGFGGLLPSLFNFQFHGFHDATLYGSTPGYPYGGYHNGFRGVPPRGQERPMARGGNQSDAFLKNILFFVGICVVIFLIW

SEQ ID NO: 33685 - DNA, 1356 bp, Arabidopsis thaliana
  misc_feature (1)..(1356): Ceres Seq. ID no. 13603846
atattgttttgagccatggaaactcttttccacactcttcttagattattactattcgtagccatctctcatactctgtcccctctcgccggttctttccggatttctaatgactttccggcggttttcaacttcggagactctaactctgacaccggagaacttagctcgggtcttggattccttccacaaccttcctatgaaataaccttctttagatctccaacttccggaagattctgcaatggacgtcttatcgtcgattttctaatggaagcaattgatcgaccatatttgaggccttatttagattcgataagtcgacaaacttaccgaagaggctgcaattttgctgcggctgcgtcaacgattcagaaggcaaatgctgcatcctatagcccctttggttttggtgttcaagtctctcaattcatcacctttaagtccaaagtccttcaattgatacaacaagatgaagagctccaaagatacttaccgtccgaatatttttttagtaatggattgtatatgtttgatatcggacaaaatgatattgccggagcattttacaccaagacagtagatcaagttcttgctctggttcctataatcttagatatatttcaagatggaataaagagattatatgcagagggggcaagaaactattggatacacaacacaggaccacttgggtgtttagcacaagttgtgtcaatttttggggaagacaaatcaaagcttgatgagtttggttgtgtcagtgaccataaccaagctgctaagcttttcaatttgcagcttcatggtcttttcaaaaaactccctcaacaatatcccaattcccgtttcacatacgtagatatcttctctatcaaatccgacctcatcctgaatcattccaaatatggttttgatcattcgataatggtatgttgtggaaccggaggaccaccactgaactacgatgatcaggttggttgcggtaagacagcaagatcaaatggtacgatcataaccgccaaaccttgttatgatagttccaaatatgttaactgggacggcattcattacactgaagctgcaaatcggtttgttgcactacacattctcaccggtaaatactctgagacggcgtcatctttgaatctttagcaatgtaacaaagaaagttacattatcactttctttatggattacatatatatttagttgtatgttaactggtttatttatgattatatgaataatttccataaacttaactgtttcatttccaaaaaaaggcatttttccaattttctttcacaaagatagatgctttgtcacaataaaatgaatctttcaaatttcctg

SEQ ID NO: 33686 - protein, 379 aa, Arabidopsis thaliana
  misc_feature (1)..(379): Ceres Seq. ID no. 13603847
METLFHTLLRLLLFVAISHTLSPLAGSFRISNDFPAVFNFGDSNSDTGELSSGLGFLPQPSYEITFFRSPTSGRFCNGRLIVDFLMEAIDRPYLRPYLDSISRQTYRRGCNFAAAASTIQKANAASYSPFGFGVQVSQFITFKSKVLQLIQQDEELQRYLPSEYFFSNGLYMFDIGQNDIAGAFYTKTVDQVLALVPIILDIFQDGIKRLYAEGARNYWIHNTGPLGCLAQVVSIFGEDKSKLDEFGCVSDHNQAAKLFNLQLHGLFKKLPQQYPNSRFTYVDIFSIKSDLILNHSKYGFDHSIMVCCGTGGPPLNYDDQVGCGKTARSNGTIITAKPCYDSSKYVNWDGIHYTEAANRFVALHILTGKYSETASSLNL

SEQ ID NO: 33687 - protein, 294 aa, Arabidopsis thaliana
  misc_feature (1)..(294): Ceres Seq. ID no. 13603848
MEAIDRPYLRPYLDSISRQTYRRGCNFAAAASTIQKANAASYSPFGFGVQVSQFITFKSKVLQLIQQDEELQRYLPSEYFFSNGLYMFDIGQNDIAGAFYTKTVDQVLALVPIILDIFQDGIKRLYAEGARNYWIHNTGPLGCLAQVVSIFGEDKSKLDEFGCVSDHNQAAKLFNLQLHGLFKKLPQQYPNSRFTYVDIFSIKSDLILNHSKYGFDHSIMVCCGTGGPPLNYDDQVGCGKTARSNGTIITAKPCYDSSKYVNWDGIHYTEAANRFVALHILTGKYSETASSLNL

SEQ ID NO: 33688 - protein, 208 aa, Arabidopsis thaliana
  misc_feature (1)..(208): Ceres Seq. ID no. 13603849
MFDIGQNDIAGAFYTKTVDQVLALVPIILDIFQDGIKRLYAEGARNYWIHNTGPLGCLAQVVSIFGEDKSKLDEFGCVSDHNQAAKLFNLQLHGLFKKLPQQYPNSRFTYVDIFSIKSDLILNHSKYGFDHSIMVCCGTGGPPLNYDDQVGCGKTARSNGTIITAKPCYDSSKYVNWDGIHYTEAANRFVALHILTGKYSETASSLNL

SEQ ID NO: 33689 - DNA, 856 bp, Arabidopsis thaliana
  misc_feature (1)..(856): Ceres Seq. ID no. 13603876
aacaaaaacagagcaaagtttttcaaaaaaaaaaaaaaaacagagccacgaagaaatttacagaaaattcaaaaccatcgataaagatgggagatgtgattttgttcattgatgatacgaaatcgaaagtgagaatcacgcgttgcagaatttgccatgaagaagaagaagaaagtttcttcgaagttccatgtgcttgttcaggcaccgttaagttcgcacatagaaactgcatacaacgttggtgtaatgaaaaaggaaacacaacttgtgaaatctgtcttcaggtgtataaagatggatatacagcagttttaaaacaatcgaaattgattgaacaagaagtcacaatcagagtaaatggacgaagaagaagaagaagtagaagattagtgtctatagctgaatccgatatttctcagtgtaattctgttgctgatagaggagcttcgttttgcagatcattaacttttactctttcagtatttttgctgatgaaacatacattcgatgtgatttacggaaccgaagaatatccattctctgtatttacggtactaacattaaaggccattgggatactattgccaatgttcattataattcgaacaatctcaactattcagaaaactcttcgtcgtcgtcatcaatatcctgaatctgaagaagaagataggttgagctctgacgacgacgatgacttggaagaagaagatgaagagcaacaacaacatttggcttaaaccttcaaattaacgaacttaacgaaattttttctttctttctttctaattctttctttttttaaacgaaaagcatctatttgatgctcatggtcatttttactcacaaagtc

SEQ ID NO: 33690 - protein, 246 aa, Arabidopsis thaliana
  misc_feature (1)..(246): Ceres Seq. ID no. 13603877
QKQSKVFQKKKKNRATKKFTENSKPSIKMGDVILFIDDTKSKVRITRCRICHEEEEESFFEVPCACSGTVKFAHRNCIQRWCNEKGNTTCEICLQVYKDGYTAVLKQSKLIEQEVTIRVNGRRRRRSRRLVSIAESDISQCNSVADRGASFCRSLTFTLSVFLLMKHTFDVIYGTEEYPFSVFTVLTLKAIGILLPMFIIIRTISTIQKTLRRRHQYPESEEEDRLSSDDDDDLEEEDEEQQQHLA

SEQ ID NO: 33691 - protein, 218 aa, Arabidopsis thaliana
  misc_feature (1)..(218): Ceres Seq. ID no. 13603878
MGDVILFIDDTKSKVRITRCRICHEEEEESFFEVPCACSGTVKFAHRNCIQRWCNEKGNTTCEICLQVYKDGYTAVLKQSKLIEQEVTIRVNGRRRRRSRRLVSIAESDISQCNSVADRGASFCRSLTFTLSVFLLMKHTFDVIYGTEEYPFSVFTVLTLKAIGILLPMFIIIRTISTIQKTLRRRHQYPESEEEDRLSSDDDDDLEEEDEEQQQHLA

SEQ ID NO: 33692 - DNA, 1682 bp, Arabidopsis thaliana
  misc_feature (1)..(1682): Ceres Seq. ID no. 13603883
tcttcttcttcttcttctttttttttcgtaaaaattcttcttcttcttcttcttctccgagctccgtccgagcagagaagaagagtaaggtaagttttagagtgcacttgtgtggcactctcatttcttatcctgcgcctcttacgatttcttatggtgcgcttctccgactagtttcggtgtctaatggactcttcctcttcttctctatctctccaagaaaaaatctcttctggttatttctagggtttcgttggttcttttttcgaaatgctttggataacgagatttgctggattattctccgccgcgatggcagtgatcgtgttatctccgtcgcttcagtcatttcctccggcggcggcaatccgttcttctccatcaccgatcttcagaaaagctccagcggtgttcaacaacggcgacgaatgtctctcctccggcggcgtctgcaatccgtcgttggtccacgtggcgatcacgttagacgtagagtacctgcgtggctcaatcgcagccgttaactcgatccttcagcactcggtgtgtccagagagcgtcttcttccacttcatcgccgtctccgaggaaacaaacctgttggagtcgctggtgagatcggttttcccgagactgaaattcaatatttacgattttgcccctgagacagttcgtggtttgatttcttcttccgtgagacaagctctcgagcagcctctgaactacgctagaagctacttagcggatctgctggagccttgtgttaaccgtgtcatatacttggattcggatcttgtcgtcgtcgatgacatcgctaagctttggaaaactagcctaggctcgaggataatcggagctccggagtattgtcacgcgaatttcacgaaatacttcaccggaggattctggtcggaggagagattctccggtacctttagagggaggaagccatgttacttcaacacaggtgtgatggtgatagatcttaagaaatggagaagaggtggttacacgaaacgtatcgagaaatggatggagattcagagaagagagaggatttacgaactaggctcgcttccaccgtttcttctagttttctccggtcacgtggctcccatctctcaccggtggaaccagcatggacttggtggtgacaatgttagaggtagctgtcgtgatttgcatcctggtcctgtgagtttgctgcattggtctggtagtggcaagccctggataagactcgattccaaacggccttgtcccttagacgcattatggacgccttacgacttgtatcgacattcgcattgacgtttcagcgaatggtggtgctatatgaggagagagtagaggaaggtttcattggtcttgaccggcccagtctgaaagaaaatcaaaggtagcttttgtagtagaagatgaaaaccctttgccgataaaatgggtttggtttagccaaaccggagacacaactgagatgtgggaattttattttcaaaccggcgggttggatcatatttttttttgttttgttgggggacaaaaaaaatcaatcagagttaggttattcatgtggatgagattctgtttttttttttatcattaatttgtgtttaaaaaacattctttcttattttgtgcagatacttattctctttgaaaaataataattagaattaccc

SEQ ID NO: 33693 - protein, 346 aa, Arabidopsis thaliana
  misc_feature (1)..(346): Ceres Seq. ID no. 13603884
MLWITRFAGLFSAAMAVIVLSPSLQSFPPAAAIRSSPSPIFRKAPAVFNNGDECLSSGGVCNPSLVHVAITLDVEYLRGSIAAVNSILQHSVCPESVFFHFIAVSEETNLLESLVRSVFPRLKFNIYDFAPETVRGLISSSVRQALEQPLNYARSYLADLLEPCVNRVIYLDSDLVVVDDIAKLWKTSLGSRIIGAPEYCHANFTKYFTGGFWSEERFSGTFRGRKPCYFNTGVMVIDLKKWRRGGYTKRIEKWMEIQRRERIYELGSLPPFLLVFSGHVAPISHRWNQHGLGGDNVRGSCRDLHPGPVSLLHWSGSGKPWIRLDSKRPCPLDALWTPYDLYRHSH

SEQ ID NO: 33694 - protein, 332 aa, Arabidopsis thaliana
  misc_feature (1)..(332): Ceres Seq. ID no. 13603885
MAVIVLSPSLQSFPPAAAIRSSPSPIFRKAPAVFNNGDECLSSGGVCNPSLVHVAITLDVEYLRGSIAAVNSILQHSVCPESVFFHFIAVSEETNLLESLVRSVFPRLKFNIYDFAPETVRGLISSSVRQALEQPLNYARSYLADLLEPCVNRVIYLDSDLVVVDDIAKLWKTSLGSRIIGAPEYCHANFTKYFTGGFWSEERFSGTFRGRKPCYFNTGVMVIDLKKWRRGGYTKRIEKWMEIQRRERIYELGSLPPFLLVFSGHVAPISHRWNQHGLGGDNVRGSCRDLHPGPVSLLHWSGSGKPWIRLDSKRPCPLDALWTPYDLYRHSH

SEQ ID NO: 33695 - protein, 173 aa, Arabidopsis thaliana
  misc_feature (1)..(173): Ceres Seq. ID no. 13603886
FFFFFFFFRKNSSSSSSSPSSVRAEKKSKVSFRVHLCGTLISYPAPLTISYGALLRLVSVSNGLFLFFSISPRKNLFWLFLGFRWFFFRNALDNEICWIILRRDGSDRVISVASVISSGGGNPFFSITDLQKSSSGVQQRRRMSLLRRRLQSVVGPRGDHVRRRVPAWLNRSR

SEQ ID NO: 33696 - DNA, 1834 bp, Arabidopsis thaliana
  misc_feature (1)..(1834): Ceres Seq. ID no. 13603891
aaagcagcttctgcaacctattcgttggttggttaatagaagctctctttctctgtctgtctttctctctcagagaaatggctcttcttctagtttcttcttcctcctcctatgccctcagagtcaccattttcttgtctttcttcttctttctctgcaatggcttctcttaccctactacttcttctcttttcaacacccatcaccatcgtcaccacttggccaagcacaactacaaagatgctctcactaaatcaatcctcttctttgaaggccaaaggtcagggaaacttccttctaaccagagaatgagttggagaagagactctggtctctctgatggctctgctcttcatgtggatttggttggagggtactatgatgcaggagacaatatcaaatttggtttcccaatggcattcacaaccacaatgctttcatggagtgtaattgaattcggtggactcatgaaatctgaattacaaaacgctaaaatagcgattcgttgggctactgattatctcctcaaagccacttcacaacctgacacaatctatgttcaagttggtgatgctaataaagaccattcttgttgggaaagacctgaagacatggatactgtaagaagtgtgtttaaagttgacaagaacattcctggttctgatgtcgccgctgaaaccgccgctgctctagccgccgccgccattgtattcagaaaatctgatccttcttactccaaagtcctcctcaaacgagccatcagtgtttttgcatttgcggacaaatacagaggaacttatagtgcaggattaaaacctgatgtttgtccattttattgctcttactctggttatcaggatgaattgttgtggggagctgcttggttacaaaaagcgacaaagaatataaaatatttgaattacataaaaatcaatggacaaatccttggagctgctgaatatgataacacttttggttgggataacaagcacgctggtgccagaatccttcttactaaggcatttttggttcagaatgtgaagacacttcatgaatacaaaggtcatgctgataatttcatctgctctgttattcctggagctcctttctcttctactcagtatacaccaggtggattattgtttaaaatggcagacgccaacatgcaatacgtgacgtcaacatcgttcttgctcttaacctatgccaaatacttaacctccgccaaaaccgtcgtccattgcggtggctccgtctacactcccggtcgtcttcgctccatcgccaaaagacaggtggattatcttcttggagacaacccattaagaatgtcttacatggttggttacggtccaaaattcccacggagaatccaccaccgtggctcctcattaccttgtgttgcaagccacccggccaagatccaatgccaccaaggatttgcaatcatgaactctcaatctccaaaccctaacttccttgttggtgcagtcgttggtggtccggaccagcatgatcgcttcccagacgaacggtctgattacgagcagtccgagccggctacttacatcaattcaccactcgttggagctcttgcctacttcgcccacgcctatggtcaactctagtttagtaacgagtgtgttagtttaagtaaaaataaaaatgaaggaagttttatctttgtttttacttttatttgttagtaatgtagtggaccgaaaatcggatcacaagtggacattggtccgagggatggtttatttggttcgttataatataacgtcaagtgtaatcttattgtggttattaatgttatcatcctattaattac

SEQ ID NO: 33697 - protein, 541 aa, Arabidopsis thaliana
  misc_feature (1)..(541): Ceres Seq. ID no. 13603892
SSFCNLFVGWLIEALFLCLSFSLREMALLLVSSSSSYALRVTIFLSFFFFLCNGFSYPTTSSLFNTHHHRHHLAKHNYKDALTKSILFFEGQRSGKLPSNQRMSWRRDSGLSDGSALHVDLVGGYYDAGDNIKFGFPMAFTTTMLSWSVIEFGGLMKSELQNAKIAIRWATDYLLKATSQPDTIYVQVGDANKDHSCWERPEDMDTVRSVFKVDKNIPGSDVAAETAAALAAAAIVFRKSDPSYSKVLLKRAISVFAFADKYRGTYSAGLKPDVCPFYCSYSGYQDELLWGAAWLQKATKNIKYLNYIKINGQILGAAEYDNTFGWDNKHAGARILLTKAFLVQNVKTLHEYKGHADNFICSVIPGAPFSSTQYTPGGLLFKMADANMQYVTSTSFLLLTYAKYLTSAKTVVHCGGSVYTPGRLRSIAKRQVDYLLGDNPLRMSYMVGYGPKFPRRIHHRGSSLPCVASHPAKIQCHQGFAIMNSQSPNPNFLVGAVVGGPDQHDRFPDERSDYEQSEPATYINSPLVGALAYFAHAYGQL

SEQ ID NO: 33698 - protein, 516 aa, Arabidopsis thaliana
  misc_feature (1)..(516): Ceres Seq. ID no. 13603893
MALLLVSSSSSYALRVTIFLSFFFFLCNGFSYPTTSSLFNTHHHRHHLAKHNYKDALTKSILFFEGQRSGKLPSNQRMSWRRDSGLSDGSALHVDLVGGYYDAGDNIKFGFPMAFTTTMLSWSVIEFGGLMKSELQNAKIAIRWATDYLLKATSQPDTIYVQVGDANKDHSCWERPEDMDTVRSVFKVDKNIPGSDVAAETAAALAAAAIVFRKSDPSYSKVLLKRAISVFAFADKYRGTYSAGLKPDVCPFYCSYSGYQDELLWGAAWLQKATKNIKYLNYIKINGQILGAAEYDNTFGWDNKHAGARILLTKAFLVQNVKTLHEYKGHADNFICSVIPGAPFSSTQYTPGGLLFKMADANMQYVTSTSFLLLTYAKYLTSAKTVVHCGGSVYTPGRLRSIAKRQVDYLLGDNPLRMSYMVGYGPKFPRRIHHRGSSLPCVASHPAKIQCHQGFAIMNSQSPNPNFLVGAVVGGPDQHDRFPDERSDYEQSEPATYINSPLVGALAYFAHAYGQL

SEQ ID NO: 33699 - protein, 439 aa, Arabidopsis thaliana
  misc_feature (1)..(439): Ceres Seq. ID no. 13603894
MSWRRDSGLSDGSALHVDLVGGYYDAGDNIKFGFPMAFTTTMLSWSVIEFGGLMKSELQNAKIAIRWATDYLLKATSQPDTIYVQVGDANKDHSCWERPEDMDTVRSVFKVDKNIPGSDVAAETAAALAAAAIVFRKSDPSYSKVLLKRAISVFAFADKYRGTYSAGLKPDVCPFYCSYSGYQDELLWGAAWLQKATKNIKYLNYIKINGQILGAAEYDNTFGWDNKHAGARILLTKAFLVQNVKTLHEYKGHADNFICSVIPGAPFSSTQYTPGGLLFKMADANMQYVTSTSFLLLTYAKYLTSAKTVVHCGGSVYTPGRLRSIAKRQVDYLLGDNPLRMSYMVGYGPKFPRRIHHRGSSLPCVASHPAKIQCHQGFAIMNSQSPNPNFLVGAVVGGPDQHDRFPDERSDYEQSEPATYINSPLVGALAYFAHAYGQL

SEQ ID NO: 33700 - DNA, 1176 bp, Arabidopsis thaliana
  misc_feature (1)..(1176): Ceres Seq. ID no. 13603895
acctgagagtaaagaagtgagaaggagaagaaagaagcaatggagaagatagagcacacgacgatatctaccaatggtattaacatgcatgtggcttcgattggttcaggtccagtgatcctattcgtccatggctttcccgatctctggtactcatggcgtcaccagcttgtctctttcgctgccttaggttaccgcgcaatcgctccagatcttcgaggatacggcgattccgatgcgccgccgtctcgtgaatcttacaccatccttcatatcgtcggagacctcgtcggattactggattcgctcggtgttgatcgggttttcctcgtcggtcacgattggggagcaattgttgcgtggtggctttgtatgatcaggcctgatcgagtcaacgcgttggtcaacactagcgttgtgtttaatccgaggaatccttctgtgaaacctgttgatgcgtttagggctttgttcggcgatgattactacatttgcaggtttcaggagcctggagagatcgaagaggactttgctcaagttgatacaaaaaagttaataaccagatttttcacttcgcgtaacccacgtccaccttgcattccaaagtcagttggtttcagaggtttacctgatccaccttctttgcccgcttggctcaccgaacaagatgtcaggttctacggagacaagtttagccaaaaaggcttcaccggtgggctaaactactatcgcgccctgaacctaagctgggaactaacagctccatggaccggtctacaaatcaaagtccctgtgaaattcatagtgggtgatctagacataacatacaatatccccggaacaaaggaatacatacatgaaggtggtttgaagaagcacgtaccttttctacaagaagtggtggtaatggaaggtgtaggtcacttcctccatcaagagaagcctgacgaggtcactgaccatatctatggcttcttcaagaaattcagaacccgcgaaaccgcatccttgtagtagttctccgtctgcacaatgtcaaattcaaggttgattaagcttgatcagggttacttactgtcttagagccctactatgtaatgttttcaaggatgctatctgtgtattgtgcttgtttaataatttagcaaaatataataatagaacaaataatttctc

SEQ ID NO: 33701 - protein, 324 aa, Arabidopsis thaliana
  misc_feature (1)..(324): Ceres Seq. ID no. 13603896
MEKIEHTTISTNGINMHVASIGSGPVILFVHGFPDLWYSWRHQLVSFAALGYRAIAPDLRGYGDSDAPPSRESYTILHIVGDLVGLLDSLGVDRVFLVGHDWGAIVAWWLCMIRPDRVNALVNTSVVFNPRNPSVKPVDAFRALFGDDYYICRFQEPGEIEEDFAQVDTKKLITRFFTSRNPRPPCIPKSVGFRGLPDPPSLPAWLTEQDVRFYGDKFSQKGFTGGLNYYRALNLSWELTAPWTGLQIKVPVKFIVGDLDITYNIPGTKEYIHEGGLKKHVPFLQEVVVMEGVGHFLHQEKPDEVTDHIYGFFKKFRTRETASL

SEQ ID NO: 33702 - protein, 309 aa, Arabidopsis thaliana
  misc_feature (1)..(309): Ceres Seq. ID no. 13603897
MHVASIGSGPVILFVHGFPDLWYSWRHQLVSFAALGYRAIAPDLRGYGDSDAPPSRESYTILHIVGDLVGLLDSLGVDRVFLVGHDWGAIVAWWLCMIRPDRVNALVNTSVVFNPRNPSVKPVDAFRALFGDDYYICRFQEPGEIEEDFAQVDTKKLITRFFTSRNPRPPCIPKSVGFRGLPDPPSLPAWLTEQDVRFYGDKFSQKGFTGGLNYYRALNLSWELTAPWTGLQIKVPVKFIVGDLDITYNIPGTKEYIHEGGLKKHVPFLQEVVVMEGVGHFLHQEKPDEVTDHIYGFFKKFRTRETASL

SEQ ID NO: 33703 - protein, 213 aa, Arabidopsis thaliana
  misc_feature (1)..(213): Ceres Seq. ID no. 13603898
MIRPDRVNALVNTSVVFNPRNPSVKPVDAFRALFGDDYYICRFQEPGEIEEDFAQVDTKKLITRFFTSRNPRPPCIPKSVGFRGLPDPPSLPAWLTEQDVRFYGDKFSQKGFTGGLNYYRALNLSWELTAPWTGLQIKVPVKFIVGDLDITYNIPGTKEYIHEGGLKKHVPFLQEVVVMEGVGHFLHQEKPDEVTDHIYGFFKKFRTRETASL

SEQ ID NO: 33704 - DNA, 902 bp, Arabidopsis thaliana
  misc_feature (1)..(902): Ceres Seq. ID no. 13603924
ccctctttgcactttcttcttcccgtcgctaccgaaagcttctgtctctctcactcgcagggttctctggaactttctgaacgatgccgaggtattactgtgattattgcgatacttatctcactcacgattccccatcagtaaggaagcagcacaatgctggttacaaacacaaggcgaatgtgagaatatactatcagcaatttgaggaacaacaaacccaaagtttgattgatcagagaattaaggaacatcttggccaaactggagggtatcaacaggttggtgctgtgtttaatcagcatatgcttgcaagacctcgccctcccatgatgctaccacctggaagtatgcctatgggtatgcgacctcctgttctgcctagacccatgatgcctcctcaaggttatatgcctcctccaggagtaccacagatgatggcaccgcctggtgctcctctacctccacctccacaaaatggtattctgaggccaccaggaatggctcccataccaggtcaaggtggcggaccaccaggaatggctcccataccaggtcaaggtggcggaccacctcccaattataatggactacctcctcctcctccttatcatacaaatccagctgctccaccaagtggtaatttcaacaatccaaacctcaacaatccgaatcccagtgctgaatctcctgaaagcaatgagtagagttagtaggtctgaatgaatcatttttctcctgccaaaaaattctcagagctcttgtttaacacaatatcctaccttttctactccaatttttatgaagaggtttagaactaacgtatgtgaaatgagttttatgtgttagatgattgtatccattagagtcatgaaaaggaaaatctgaggtttcttatctct

SEQ ID NO: 33705 - protein, 207 aa, Arabidopsis thaliana
  misc_feature (1)..(207): Ceres Seq. ID no. 13603925
MPRYYCDYCDTYLTHDSPSVRKQHNAGYKHKANVRIYYQQFEEQQTQSLIDQRIKEHLGQTGGYQQVGAVFNQHMLARPRPPMMLPPGSMPMGMRPPVLPRPMMPPQGYMPPPGVPQMMAPPGAPLPPPPQNGILRPPGMAPIPGQGGGPPGMAPIPGQGGGPPPNYNGLPPPPPYHTNPAAPPSGNFNNPNLNNPNPSAESPESNE

SEQ ID NO: 33706 - protein, 133 aa, Arabidopsis thaliana
  misc_feature (1)..(133): Ceres Seq. ID no. 13603926
MLARPRPPMMLPPGSMPMGMRPPVLPRPMMPPQGYMPPPGVPQMMAPPGAPLPPPPQNGILRPPGMAPIPGQGGGPPGMAPIPGQGGGPPPNYNGLPPPPPYHTNPAAPPSGNFNNPNLNNPNPSAESPESNE

SEQ ID NO: 33707 - protein, 125 aa, Arabidopsis thaliana
  misc_feature (1)..(125): Ceres Seq. ID no. 13603927
MMLPPGSMPMGMRPPVLPRPMMPPQGYMPPPGVPQMMAPPGAPLPPPPQNGILRPPGMAPIPGQGGGPPGMAPIPGQGGGPPPNYNGLPPPPPYHTNPAAPPSGNFNNPNLNNPNPSAESPESNE

SEQ ID NO: 33708 - DNA, 2332 bp, Arabidopsis thaliana
  misc_feature (1)..(2332): Ceres Seq. ID no. 13603928
acataaagattcctagtcttatactctgtctctctctctctctctctttttcacactcacacacaaactaaaccggaatggccaccgccgacgaattctccgacgaagatacatcaccgattgaagaagtccgtttaacggtaacaaacaccgacgatccaacactaccggtttggacattcaggatgtggttcttgggtctaatctcatgttctctcctctctttccttaaccaattcttctcgtaccgaaccgaaccgctcgtaatcactcaaatcacggttcaggtggctacactacctatcggtcatttcttggccaaggtgcttcccaaaacccggtttgggttacccggttgtggatcggcccggttctcgctgaacccgggtccgtttaacatgaaagagcatgttttgatatcgatatttgcgaatgcgggtagtgctttcggatccgggtcggcttatgcggttggtatcatcacaattattaaagctttttatggccggagtatctcttttattgccggctggctcctcatcatcactacacaggtattgggatatggctgggccggtttactgaggaaatatgtggtcgaaccggctcatatgtggtggcctagcactctggttcaagtgtcactgtttagggcattgcatgagaaggacgaccaaaggatgacgagagcaaaattctttgtgatagcattagtctgtagttttggatggtacatagtccctggctatctcttcacaacactcacaagcatctcatgggtttgttgggcatttccaagatcagtcactgctcaacagattggttctggaatgagaggtcttggtcttggagcctttacactagactggaccgcggttgcctctttcttgtttagtccacttatcagccccttcttcgccatcgctaatgttttcatcggttatgttcttttgatctacttcgtcttgcctttagcctattggggatttgattcttataacgctacgaggtttcctatattttcgtcgcatcttttcacatcggttggtaatacatatgatattcctgcgatcgtgaatgataactttgagctcgatttagctaagtatgagcaacaaggaaggattaacttgagcatgttctttgctcttacctatgggcttggtttcgccaccattgcttctacgctcactcatgtagctctcttctatggcaaggaaatttctgagaggtttcgagtttcatacaaaggcaaggaagatatacacactaggttaatgaagagatataaagacataccttcatggtggttttactcaatgttggctgcgacactacttatctctcttgcattatgtgttttcttgaacgatgaggttcaaatgccttggtggggacttgtgttcgcaagcgcgatggctttcgtcttcacactcccgataagcatcataaccgcaacaactaaccaaacaccgggattgaatataataacagagtacgcaatgggactcatttacccgggacgacctatcgcaaacgtatgcttcaaagtctatggatacatgagtatggcacaagcagtctctttcttaaatgacttcaaacttggtcattacatgaagatcccacctagatccatgttcttggttcaattcatcggtacaattcttgccggaacaatcaacataacggtcgcatggtggcagttaaactctatcaaaaacatatgtcaagaggaacttctacctcccaacagtccatggacatgtccgggtgaccgtgttttcttcgatgcatcggtcatttggggattggtcggaccaaaacggatttttggttctcagggaaactatgcggccatgaactggtttttcctcggaggtgcattaggaccagtcatagtgtggtcattgcacaaagcgttcccaaaacgttcttggattccacttgtaaatctccctgttcttctaggagcaaccgcaatgatgccacctgcgaccgcggtgaactacaactcgtggatattggtggggacgatattcaacttgtttgtgttccggtacaggaaaagttggtggcagaggtataactacgttctctcagccgctatggatgccggtgtagctttcatggcggttttgttgtacttctcggtggggatggaggaaaagagtttggactggtggggaacaagaggtgaacattgtgatctagctaaatgtccaaccgctagaggagtaattgttgatggttgtccggttaaataatcttaaaggatccattggtgtgtttcaacaatgtatgatacacaaagtaactaattaagaatttc

SEQ ID NO: 33709 - protein, 729 aa, Arabidopsis thaliana
  misc_feature (1)..(729): Ceres Seq. ID no. 13603929
MATADEFSDEDTSPIEEVRLTVTNTDDPTLPVWTFRMWFLGLISCSLLSFLNQFFSYRTEPLVITQITVQVATLPIGHFLAKVLPKTRFGLPGCGSARFSLNPGPFNMKEHVLISIFANAGSAFGSGSAYAVGIITIIKAFYGRSISFIAGWLLIITTQVLGYGWAGLLRKYVVEPAHMWWPSTLVQVSLFRALHEKDDQRMTRAKFFVIALVCSFGWYIVPGYLFTTLTSISWVCWAFPRSVTAQQIGSGMRGLGLGAFTLDWTAVASFLFSPLISPFFAIANVFIGYVLLIYFVLPLAYWGFDSYNATRFPIFSSHLFTSVGNTYDIPAIVNDNFELDLAKYEQQGRINLSMFFALTYGLGFATIASTLTHVALFYGKEISERFRVSYKGKEDIHTRLMKRYKDIPSWWFYSMLAATLLISLALCVFLNDEVQMPWWGLVFASAMAFVFTLPISIITATTNQTPGLNIITEYAMGLIYPGRPIANVCFKVYGYMSMAQAVSFLNDFKLGHYMKIPPRSMFLVQFIGTILAGTINITVAWWQLNSIKNICQEELLPPNSPWTCPGDRVFFDASVIWGLVGPKRIFGSQGNYAAMNWFFLGGALGPVIVWSLHKAFPKRSWIPLVNLPVLLGATAMMPPATAVNYNSWILVGTIFNLFVFRYRKSWWQRYNYVLSAAMDAGVAFMAVLLYFSVGMEEKSLDWWGTRGEHCDLAKCPTARGVIVDGCPVK

SEQ ID NO: 33710 - protein, 693 aa, Arabidopsis thaliana
  misc_feature (1)..(693): Ceres Seq. ID no. 13603930
MWFLGLISCSLLSFLNQFFSYRTEPLVITQITVQVATLPIGHFLAKVLPKTRFGLPGCGSARFSLNPGPFNMKEHVLISIFANAGSAFGSGSAYAVGIITIIKAFYGRSISFIAGWLLIITTQVLGYGWAGLLRKYVVEPAHMWWPSTLVQVSLFRALHEKDDQRMTRAKFFVIALVCSFGWYIVPGYLFTTLTSISWVCWAFPRSVTAQQIGSGMRGLGLGAFTLDWTAVASFLFSPLISPFFAIANVFIGYVLLIYFVLPLAYWGFDSYNATRFPIFSSHLFTSVGNTYDIPAIVNDNFELDLAKYEQQGRINLSMFFALTYGLGFATIASTLTHVALFYGKEISERFRVSYKGKEDIHTRLMKRYKDIPSWWFYSMLAATLLISLALCVFLNDEVQMPWWGLVFASAMAFVFTLPISIITATTNQTPGLNIITEYAMGLIYPGRPIANVCFKVYGYMSMAQAVSFLNDFKLGHYMKIPPRSMFLVQFIGTILAGTINITVAWWQLNSIKNICQEELLPPNSPWTCPGDRVFFDASVIWGLVGPKRIFGSQGNYAAMNWFFLGGALGPVIVWSLHKAFPKRSWIPLVNLPVLLGATAMMPPATAVNYNSWILVGTIFNLFVFRYRKSWWQRYNYVLSAAMDAGVAFMAVLLYFSVGMEEKSLDWWGTRGEHCDLAKCPTARGVIVDGCPVK

SEQ ID NO: 33711 - protein, 622 aa, Arabidopsis thaliana
  misc_feature (1)..(622): Ceres Seq. ID no. 13603931
MKEHVLISIFANAGSAFGSGSAYAVGIITIIKAFYGRSISFIAGWLLIITTQVLGYGWAGLLRKYVVEPAHMWWPSTLVQVSLFRALHEKDDQRMTRAKFFVIALVCSFGWYIVPGYLFTTLTSISWVCWAFPRSVTAQQIGSGMRGLGLGAFTLDWTAVASFLFSPLISPFFAIANVFIGYVLLIYFVLPLAYWGFDSYNATRFPIFSSHLFTSVGNTYDIPAIVNDNFELDLAKYEQQGRINLSMFFALTYGLGFATIASTLTHVALFYGKEISERFRVSYKGKEDIHTRLMKRYKDIPSWWFYSMLAATLLISLALCVFLNDEVQMPWWGLVFASAMAFVFTLPISIITATTNQTPGLNIITEYAMGLIYPGRPIANVCFKVYGYMSMAQAVSFLNDFKLGHYMKIPPRSMFLVQFIGTILAGTINITVAWWQLNSIKNICQEELLPPNSPWTCPGDRVFFDASVIWGLVGPKRIFGSQGNYAAMNWFFLGGALGPVIVWSLHKAFPKRSWIPLVNLPVLLGATAMMPPATAVNYNSWILVGTIFNLFVFRYRKSWWQRYNYVLSAAMDAGVAFMAVLLYFSVGMEEKSLDWWGTRGEHCDLAKCPTARGVIVDGCPVK

SEQ ID NO: 33712 - DNA, 1408 bp, Arabidopsis thaliana
  misc_feature (1)..(1408): Ceres Seq. ID no. 13603939
gaacttgtaaaccttactctcgaagagtcctctgttactcatttttacattgtaaaaaaaaacttcttttcttctctacgtgaataagaatctgaagagtcattttctcaagaatgacgtggctaaaacaaatgtggtcaagcattttagtgctagccgtggtggtgatcggagccagagctgtgcccatcacgtatcttgaatctgcagtggctaaaggagctgtgtgtttggatggtagcgcgccagcataccatttcgataagggatcgggctcaggagtgaacaattggatcgttcatatggaaggaggaggatggtgcactgatatagctacatgcgttcaacgtaaaagtacaatgaagggttcttctaagcttatgaacaaagactttggtttctccggtatcttgggtggcaagcaaagcaccaatccagacttttacaattggaatagaatcaaagttcggtattgcgatggttcatctttcaccggtgatatagaagctgttgatccgacgcacaagctgttctttcgcggtgctagggtttggcgtgcggtgatcgatgatcttatggctaagggaatgagcaacgctcaaaacgctatactctccggttgttcagctggagcattggctgcgattctacattgcgaccagttcaagtccactctccctaaaacggctaaggtcaaatgtgtttctgacgctggttacttcatccacggtaaggatatcactggaggatcttacatccaatcctactacgccaaagtcgtagcgacccacggatctgcaaagagtctacctgcttcttgcacctcaagtatgaagcctgatttgtgtttcttccctcaatacgttgctaagaccttacaaacaccgcttttcgtcatcaatgccgccttcgattcttggcagatcaagaatgtattggcaccaacctctgttgataaaagcaaagcatggaagacttgtaagcttgatcttaagaagtgtacggccgctcagcttcaaaccgttcaaggatatagagaccaagtgttggctgcgttggcgcctgttcgatccgcgacgacgaacggattgttcttggactcgtgccatgctcattgccaaggtggaagcgctgccacttggtccggcgacaaaggtcccacagtcgcgaatacgaaaatggctaaggcggttggagattggttctttgagaggagtacgtttcagaacgtagattgttcatcgcttaattgcaaccctacttgccctgcagtatctactgaagactaaaatttattcattgatgtcttaaaatttattcatctttggaatattgttcttgaaatttaaaagtaaaataatataattgatacaatttcattcgaataaataaaatcctttgcccttct

SEQ ID NO: 33713 - protein, 391 aa, Arabidopsis thaliana
  misc_feature (1)..(391): Ceres Seq. ID no. 13603940
MTWLKQMWSSILVLAVVVIGARAVPITYLESAVAKGAVCLDGSAPAYHFDKGSGSGVNNWIVHMEGGGWCTDIATCVQRKSTMKGSSKLMNKDFGFSGILGGKQSTNPDFYNWNRIKVRYCDGSSFTGDIEAVDPTHKLFFRGARVWRAVIDDLMAKGMSNAQNAILSGCSAGALAAILHCDQFKSTLPKTAKVKCVSDAGYFIHGKDITGGSYIQSYYAKVVATHGSAKSLPASCTSSMKPDLCFFPQYVAKTLQTPLFVINAAFDSWQIKNVLAPTSVDKSKAWKTCKLDLKKCTAAQLQTVQGYRDQVLAALAPVRSATTNGLFLDSCHAHCQGGSAATWSGDKGPTVANTKMAKAVGDWFFERSTFQNVDCSSLNCNPTCPAVSTED

SEQ ID NO: 33714 - protein, 385 aa, Arabidopsis thaliana
  misc_feature (1)..(385): Ceres Seq. ID no. 13603941
MWSSILVLAVVVIGARAVPITYLESAVAKGAVCLDGSAPAYHFDKGSGSGVNNWIVHMEGGGWCTDIATCVQRKSTMKGSSKLMNKDFGFSGILGGKQSTNPDFYNWNRIKVRYCDGSSFTGDIEAVDPTHKLFFRGARVWRAVIDDLMAKGMSNAQNAILSGCSAGALAAILHCDQFKSTLPKTAKVKCVSDAGYFIHGKDITGGSYIQSYYAKVVATHGSAKSLPASCTSSMKPDLCFFPQYVAKTLQTPLFVINAAFDSWQIKNVLAPTSVDKSKAWKTCKLDLKKCTAAQLQTVQGYRDQVLAALAPVRSATTNGLFLDSCHAHCQGGSAATWSGDKGPTVANTKMAKAVGDWFFERSTFQNVDCSSLNCNPTCPAVSTED

SEQ ID NO: 33715 - protein, 328 aa, Arabidopsis thaliana
  misc_feature (1)..(328): Ceres Seq. ID no. 13603942
MEGGGWCTDIATCVQRKSTMKGSSKLMNKDFGFSGILGGKQSTNPDFYNWNRIKVRYCDGSSFTGDIEAVDPTHKLFFRGARVWRAVIDDLMAKGMSNAQNAILSGCSAGALAAILHCDQFKSTLPKTAKVKCVSDAGYFIHGKDITGGSYIQSYYAKVVATHGSAKSLPASCTSSMKPDLCFFPQYVAKTLQTPLFVINAAFDSWQIKNVLAPTSVDKSKAWKTCKLDLKKCTAAQLQTVQGYRDQVLAALAPVRSATTNGLFLDSCHAHCQGGSAATWSGDKGPTVANTKMAKAVGDWFFERSTFQNVDCSSLNCNPTCPAVSTED

SEQ ID NO: 33716 - DNA, 1377 bp, Arabidopsis thaliana
  misc_feature (1)..(1377): Ceres Seq. ID no. 13603958
attcttcaaaactatattatataaacacatttttcgtttcttcacattcacaaaacatctctctctttcttctcccattcactcactatcttgctcctagaaaaagatggcgagaatgagtttgatgatcatgatgattatggttgctgtgaccatgattaacattgctaagagtgatcccattgcaccatgttacttcatatttggtgactctttggttgataatggcaacaataatcagcttcagtcattagctagagctaattactttccttacggtattgactttgctgccggtccaaccggtcggtttagcaacggcttaaccactgtcgatgttatcgctcagcttttgggtttcgaggactacattacaccttacgcttctgcaagaggacaagacattctccgaggagttaactatgcttccgctgctgccggaatccgagacgaaaccggcagacaattgggaggtcgaatagcatttgcagggcaagtagcaaatcacgtgaacactgtgtcacaagtagtgaacatacttggtgatcaaaacgaagcctcgaattacctcagcaaatgcatttactctatcggattaggcagtaacgattatcttaacaactacttcatgcctactttttactctaccggtaaccagttctcccccgaatcctatgccgacgatctcgttgcccgttacaccgaacaactcagggtactgtataccaatggagcgaggaagtttgcgttgataggagtcggggcaatcggttgcagcccgaacgagctagctcaaaacagcagagacggaagaacgtgtgacgaaagaatcaactcagcgaacagaatctttaacagcaaactcatatctatagtcgacgcttttaaccagaacacaccagatgcaaaattcacttacatcaacgcttatggcatcttccaagacattattacaaaccctgctcgctacgggtttagagtgacaaatgcaggatgttgtggagttgggaggaacaatggacagataacttgtcttccaggtcaagcaccatgtctaaataggaatgagtatgtgttttgggatgcgtttcatcccggtgaagctgcgaatattgttattggaagacgatcttttaagcgagaagctgcttctgatgctcatccttatgatattcagcagctagcatctctctaaagagagaaagatcttttggttgtctaagtattttgatagttcttcaatggcagctgagttttggactcaagaagaagtgatttggtttgtgttgtgtgatgtcataactgtttatgtaatgatttggagttactgtttatctctttttctcttaacagttttataaatttgattctttcatt

SEQ ID NO: 33717 - protein, 362 aa, Arabidopsis thaliana
  misc_feature (1)..(362): Ceres Seq. ID no. 13603959
MARMSLMIMMIMVAVTMINIAKSDPIAPCYFIFGDSLVDNGNNNQLQSLARANYFPYGIDFAAGPTGRFSNGLTTVDVIAQLLGFEDYITPYASARGQDILRGVNYASAAAGIRDETGRQLGGRIAFAGQVANHVNTVSQVVNILGDQNEASNYLSKCIYSIGLGSNDYLNNYFMPTFYSTGNQFSPESYADDLVARYTEQLRVLYTNGARKFALIGVGAIGCSPNELAQNSRDGRTCDERINSANRIFNSKLISIVDAFNQNTPDAKFTYINAYGIFQDIITNPARYGFRVTNAGCCGVGRNNGQITCLPGQAPCLNRNEYVFWDAFHPGEAANIVIGRRSFKREAASDAHPYDIQQLASL

SEQ ID NO: 33718 - protein, 359 aa, Arabidopsis thaliana
  misc_feature (1)..(359): Ceres Seq. ID no. 13603960
MSLMIMMIMVAVTMINIAKSDPIAPCYFIFGDSLVDNGNNNQLQSLARANYFPYGIDFAAGPTGRFSNGLTTVDVIAQLLGFEDYITPYASARGQDILRGVNYASAAAGIRDETGRQLGGRIAFAGQVANHVNTVSQVVNILGDQNEASNYLSKCIYSIGLGSNDYLNNYFMPTFYSTGNQFSPESYADDLVARYTEQLRVLYTNGARKFALIGVGAIGCSPNELAQNSRDGRTCDERINSANRIFNSKLISIVDAFNQNTPDAKFTYINAYGIFQDIITNPARYGFRVTNAGCCGVGRNNGQITCLPGQAPCLNRNEYVFWDAFHPGEAANIVIGRRSFKREAASDAHPYDIQQLASL

SEQ ID NO: 33719 - protein, 356 aa, Arabidopsis thaliana
  misc_feature (1)..(356): Ceres Seq. ID no. 13603961
MIMMIMVAVTMINIAKSDPIAPCYFIFGDSLVDNGNNNQLQSLARANYFPYGIDFAAGPTGRFSNGLTTVDVIAQLLGFEDYITPYASARGQDILRGVNYASAAAGIRDETGRQLGGRIAFAGQVANHVNTVSQVVNILGDQNEASNYLSKCIYSIGLGSNDYLNNYFMPTFYSTGNQFSPESYADDLVARYTEQLRVLYTNGARKFALIGVGAIGCSPNELAQNSRDGRTCDERINSANRIFNSKLISIVDAFNQNTPDAKFTYINAYGIFQDIITNPARYGFRVTNAGCCGVGRNNGQITCLPGQAPCLNRNEYVFWDAFHPGEAANIVIGRRSFKREAASDAHPYDIQQLASL

SEQ ID NO: 33720 - DNA, 772 bp, Arabidopsis thaliana
  misc_feature (1)..(772): Ceres Seq. ID no. 13603962
ggatagagaagataatgagctccttggggttttcagttggaacttgttctcctccaagtgagaaaagaaaatgcagatttcttgtgaataatagcttaaacaaagcagaggctattaacttgagaaacaagcaaaaagtttcttctgatcctgagttaagttttgcccaattatcctcatgtggtagaagagaagcaattattggttttggtttctctattggcttgcttgataatgtttctgcattagccgaaacaacttcttgtgaattctctgtgtctccttctggtcttgctttttgtgataaagttgttggttatggtcctgaagctgttaaagggcaactaatcaaggcacattatgtagggaagttggagaatgggaaagtctttgatagtagctataatcgagggaaacctcttactttccgaattggtgttggtgaggtgataaaaggttgggatcaaggaatccttggctctgatggaattcctcctatgcttactggtgggaaacgaacattgaggattcctccagaactcgcgtatggtgatcgaggcgcaggttgcaaaggaggctcatgccttattcctccagcttcggttcttctctttgacattgagtacataggtaaagcttgagagagcttttttgcttttgctttgccttttctgagccatatcatactcttgtttgaatcatccttatagaagaaaaaaatatgtctattattttttctactatgtaatcaagtgaatatctcagctttttc

SEQ ID NO: 33721 - protein, 212 aa, Arabidopsis thaliana
  misc_feature (1)..(212): Ceres Seq. ID no. 13603963
IEKIMSSLGFSVGTCSPPSEKRKCRFLVNNSLNKAEAINLRNKQKVSSDPELSFAQLSSCGRREAIIGFGFSIGLLDNVSALAETTSCEFSVSPSGLAFCDKVVGYGPEAVKGQLIKAHYVGKLENGKVFDSSYNRGKPLTFRIGVGEVIKGWDQGILGSDGIPPMLTGGKRTLRIPPELAYGDRGAGCKGGSCLIPPASVLLFDIEYIGKA

SEQ ID NO: 33722 - protein, 208 aa, Arabidopsis thaliana
  misc_feature (1)..(208): Ceres Seq. ID no. 13603964
MSSLGFSVGTCSPPSEKRKCRFLVNNSLNKAEAINLRNKQKVSSDPELSFAQLSSCGRREAIIGFGFSIGLLDNVSALAETTSCEFSVSPSGLAFCDKVVGYGPEAVKGQLIKAHYVGKLENGKVFDSSYNRGKPLTFRIGVGEVIKGWDQGILGSDGIPPMLTGGKRTLRIPPELAYGDRGAGCKGGSCLIPPASVLLFDIEYIGKA

SEQ ID NO: 33723 - DNA, 1056 bp, Arabidopsis thaliana
  misc_feature (1)..(1056): Ceres Seq. ID no. 13603965
gtttgatattttccaattccgcgtctttctctgttgaaatcgaaaaaattttcaaaacaaaatctaaggaaaaaagagcaacaagtttcaaatctcatttgggtttttcattttgaaaagaaggacccatttttatctctctctttgttttgttttctcgaatctgaaggagtaaagttaaaagctttgaaggagagaatcaatggcgggttacagagcagatgatgaatacgattacctattcaaggttgttctgataggtgattcaggtgtgggcaaatccaatttgctttcacgattcacgaagaacgagtttagtctcgagtcaaaatccacgatcggggtcgagttcgcgactcggagtttgaatgttgatgataaagtcatcaaagctcagatttgggatactgctggtcaagaaaggtaccgagccatcactagtgcgtattaccgaggagctgttggagcgcttcttgtctacgatgtaacccgacactcaacatttgaaaacgttgagacttggctgaaagaactcagaaaccacactgatccaaacattgtagtcatgctcgtgggcaacaaatctgaccttcgccatctcgtggctgttcagactgaagatgctaagtcattcgccgagaaagaatctctctacttcatggaaacctcggctctcgaagccaccaatgttgagaacgctttcgccgaagtcctcactcagattcaccacattgtgagcaagaaggcgatggaagctgcgagcgaatccgctaatgttccatcgaaaggagacaagatcgatatcggtaaagatgtttcagctgtgaagaaaggtggatgctgctcgaactaatcagagagtagaattattgttaacaacctaaggatcggtttttgttaacggttctatcgaatatgaagattgcttttaggttgagtaatgcccatttggtgtatttctgttatttatctgatctatcaatgttattgtttgaaaatgctatgtcaaattttcagaaccctaaattatatttatctcaaacaatagaattgttg

SEQ ID NO: 33724 - protein, 216 aa, Arabidopsis thaliana
  misc_feature (1)..(216): Ceres Seq. ID no. 13603966
MAGYRADDEYDYLFKVVLIGDSGVGKSNLLSRFTKNEFSLESKSTIGVEFATRSLNVDDKVIKAQIWDTAGQERYRAITSAYYRGAVGALLVYDVTRHSTFENVETWLKELRNHTDPNIVVMLVGNKSDLRHLVAVQTEDAKSFAEKESLYFMETSALEATNVENAFAEVLTQIHHIVSKKAMEAASESANVPSKGDKIDIGKDVSAVKKGGCCSN

SEQ ID NO: 33725 - DNA, 1239 bp, Arabidopsis thaliana
  misc_feature (1)..(1239): Ceres Seq. ID no. 13603971
aatcaaattaagagcaaaagtcatttaactttcctaaaacaatggctttaaaacatatgcaaatctttctcttcgtcgctatattttcatcattctgtttctccatcactctttctcgtccactcgacaatgaactcatcatgcaaaagaggcacatcgagtggatgactaaacacggccgtgtctacgcggatgtgaaggaggaaaacaatcgctacgttgtgttcaaaaacaacgtcgaacgcattgaacatttaaatagcattcctgccggaagaactttcaaacttgcggtaaatcagtttgctgatttaaccaatgacgaatttcgttccatgtacactggtttcaaaggtgtctcggcattatctagccaaagccaaactaaaatgtcgccgtttaggtaccaaaacgtttcttctggtgctttgccggtttctgttgactggaggaagaaaggagctgtgacccctatcaagaatcaaggcagctgcggatgttgttgggcgttttcagcggttgcggctattgaaggagcaacacaaataaagaaagggaaacttatatctttgtcagaacaacagcttgttgattgcgacacaaacgattttggctgcgaaggcggtttaatggatactgcgtttgagcatataaaagcgactggcggcttgacaactgagtcaaattatccttacaaaggcgaagacgctacttgcaattccaaaaagaccaatccaaaagcaacttctattacaggttatgaggatgtcccggttaatgatgagcaagcactgatgaaggcagtggcacaccaaccggttagcgttggaattgaaggaggtggttttgatttccaattctattcgtctggtgtgttcactggagagtgcactacgtatcttgatcatgcagtaactgcgattggatacggcgaatctactaacggatcaaagtattggatcatcaagaattcatggggaacaaaatggggagaaagtggatatatgaggattcaaaaagatgtcaaggataaacaaggactatgtggtcttgccatgaaagcttcttacccaactatatgaattcaaaaccgtgttaagcttttaattgtgtatgtttgtgtgggattgatgtctaaaaataatttgaattgttttatgtaaaaaaattgtatttagactgttgtatgcattttatgaaattgtaagcttatgtaatgcaaaggattgataattttcg

SEQ ID NO: 33726 - protein, 346 aa, Arabidopsis thaliana
  misc_feature (1)..(346): Ceres Seq. ID no. 13603972
MALKHMQIFLFVAIFSSFCFSITLSRPLDNELIMQKRHIEWMTKHGRVYADVKEENNRYVVFKNNVERIEHLNSIPAGRTFKLAVNQFADLTNDEFRSMYTGFKGVSALSSQSQTKMSPFRYQNVSSGALPVSVDWRKKGAVTPIKNQGSCGCCWAFSAVAAIEGATQIKKGKLISLSEQQLVDCDTNDFGCEGGLMDTAFEHIKATGGLTTESNYPYKGEDATCNSKKTNPKATSITGYEDVPVNDEQALMKAVAHQPVSVGIEGGGFDFQFYSSGVFTGECTTYLDHAVTAIGYGESTNGSKYWIIKNSWGTKWGESGYMRIQKDVKDKQGLCGLAMKASYPTI

SEQ ID NO: 33727 - protein, 341 aa, Arabidopsis thaliana
  misc_feature (1)..(341): Ceres Seq. ID no. 13603973
MQIFLFVAIFSSFCFSITLSRPLDNELIMQKRHIEWMTKHGRVYADVKEENNRYVVFKNNVERIEHLNSIPAGRTFKLAVNQFADLTNDEFRSMYTGFKGVSALSSQSQTKMSPFRYQNVSSGALPVSVDWRKKGAVTPIKNQGSCGCCWAFSAVAAIEGATQIKKGKLISLSEQQLVDCDTNDFGCEGGLMDTAFEHIKATGGLTTESNYPYKGEDATCNSKKTNPKATSITGYEDVPVNDEQALMKAVAHQPVSVGIEGGGFDFQFYSSGVFTGECTTYLDHAVTAIGYGESTNGSKYWIIKNSWGTKWGESGYMRIQKDVKDKQGLCGLAMKASYPTI

SEQ ID NO: 33728 - protein, 313 aa, Arabidopsis thaliana
  misc_feature (1)..(313): Ceres Seq. ID no. 13603974
MQKRHIEWMTKHGRVYADVKEENNRYVVFKNNVERIEHLNSIPAGRTFKLAVNQFADLTNDEFRSMYTGFKGVSALSSQSQTKMSPFRYQNVSSGALPVSVDWRKKGAVTPIKNQGSCGCCWAFSAVAAIEGATQIKKGKLISLSEQQLVDCDTNDFGCEGGLMDTAFEHIKATGGLTTESNYPYKGEDATCNSKKTNPKATSITGYEDVPVNDEQALMKAVAHQPVSVGIEGGGFDFQFYSSGVFTGECTTYLDHAVTAIGYGESTNGSKYWIIKNSWGTKWGESGYMRIQKDVKDKQGLCGLAMKASYPTI

SEQ ID NO: 33729 - DNA, 1277 bp, Arabidopsis thaliana
  misc_feature (1)..(1277): Ceres Seq. ID no. 13603975
aactgaatttgaaagaaaaaaaaaaagaaatcataaaatgagaatcaatatgttattcatagtggcattctcatttttagtctctgttcggtcattaccgatgagaccaactctaaagtacgagtcaatctttaattttggcgattctttaagcgataccggaaactttttattatccggtgatgttgactctccgaacattggaagactaccgtacggacaaaccttttttaaccgttccaccggtcgttgctctgacggacgtctcatcatcgatttcatcgctgaggctagtggactaccgtacattccaccgtatctccaaagcttacggacgaatgattcggtagatttcaagagaggtgcaaattttgcggtggctggagcaacagcgaacgaatttagcttctttaaaaacagaggtctttcagtaacattgttgacaaacaagacactggatattcaacttgattggttcaagaagttgaaaccttctctgtgtaaaaccaagccagaatgtgaacaatattttagaaaatctctatttctcgttggagaaattggtggaaacgattataactaccctcttttggcattccgaagtttcaaacatgctatggatttggtaccatttgttattaacaaaatcatggacgtcacaagtgcattgatagaggaaggtgccatgacactaatagttccaggaaaccttccaatcggttgttctgcggctctactagagcggtttaatgataatagtggatggctttatgactcgaggaaccaatgctacatgccattgaacaatttggctaagcttcacaatgataagctcaagaaaggcctcgcggctctaagaaaaaagtacccttatgccaaaattatatatgctgattattacagttctgccatgcaattcttcaactcaccttccaaatacggtttcactggaagtgtcctaaaggcatgttgtggaggaggagatggaagatacaacgtgcaaccaaacgtgcggtgcggagaaaagggttcaaccacttgcgaagatccatcaacgtacgcaaattgggacggaattcacctcactgaagcggcttaccgccacattgcaactggtctcatctccggccgtttcaccatgcctacttataattaataacaattaagttactcataagttgtaactttttttttaacacacaaacttttcatataactcctaattgaaaacctataaatcgatcatatttatatcaagctcgttcgagagcataagc

SEQ ID NO: 33730 - protein, 384 aa, Arabidopsis thaliana
  misc_feature (1)..(384): Ceres Seq. ID no. 13603976
TEFERKKKRNHKMRINMLFIVAFSFLVSVRSLPMRPTLKYESIFNFGDSLSDTGNFLLSGDVDSPNIGRLPYGQTFFNRSTGRCSDGRLIIDFIAEASGLPYIPPYLQSLRTNDSVDFKRGANFAVAGATANEFSFFKNRGLSVTLLTNKTLDIQLDWFKKLKPSLCKTKPECEQYFRKSLFLVGEIGGNDYNYPLLAFRSFKHAMDLVPFVINKIMDVTSALIEEGAMTLIVPGNLPIGCSAALLERFNDNSGWLYDSRNQCYMPLNNLAKLHNDKLKKGLAALRKKYPYAKIIYADYYSSAMQFFNSPSKYGFTGSVLKACCGGGDGRYNVQPNVRCGEKGSTTCEDPSTYANWDGIHLTEAAYRHIATGLISGRFTMPTYN

SEQ ID NO: 33731 - protein, 372 aa, Arabidopsis thaliana
  misc_feature (1)..(372): Ceres Seq. ID no. 13603977
MRINMLFIVAFSFLVSVRSLPMRPTLKYESIFNFGDSLSDTGNFLLSGDVDSPNIGRLPYGQTFFNRSTGRCSDGRLIIDFIAEASGLPYIPPYLQSLRTNDSVDFKRGANFAVAGATANEFSFFKNRGLSVTLLTNKTLDIQLDWFKKLKPSLCKTKPECEQYFRKSLFLVGEIGGNDYNYPLLAFRSFKHAMDLVPFVINKIMDVTSALIEEGAMTLIVPGNLPIGCSAALLERFNDNSGWLYDSRNQCYMPLNNLAKLHNDKLKKGLAALRKKYPYAKIIYADYYSSAMQFFNSPSKYGFTGSVLKACCGGGDGRYNVQPNVRCGEKGSTTCEDPSTYANWDGIHLTEAAYRHIATGLISGRFTMPTYN

SEQ ID NO: 33732 - protein, 368 aa, Arabidopsis thaliana
  misc_feature (1)..(368): Ceres Seq. ID no. 13603978
MLFIVAFSFLVSVRSLPMRPTLKYESIFNFGDSLSDTGNFLLSGDVDSPNIGRLPYGQTFFNRSTGRCSDGRLIIDFIAEASGLPYIPPYLQSLRTNDSVDFKRGANFAVAGATANEFSFFKNRGLSVTLLTNKTLDIQLDWFKKLKPSLCKTKPECEQYFRKSLFLVGEIGGNDYNYPLLAFRSFKHAMDLVPFVINKIMDVTSALIEEGAMTLIVPGNLPIGCSAALLERFNDNSGWLYDSRNQCYMPLNNLAKLHNDKLKKGLAALRKKYPYAKIIYADYYSSAMQFFNSPSKYGFTGSVLKACCGGGDGRYNVQPNVRCGEKGSTTCEDPSTYANWDGIHLTEAAYRHIATGLISGRFTMPTYN

SEQ ID NO: 33733 - DNA, 1245 bp, Arabidopsis thaliana
  misc_feature (1)..(1245): Ceres Seq. ID no. 13603979
atatgacatttacattctctcaaaagaaactttctacataatataaaaagtcacacattctctctattaattaaacatgttgcttgttgcgtttgtgactcttttggtagcagtagctttgcagccactaccgtcagtgttgtctttggacgttcaccttcttcggcagctagccgcaaagcacaatgtgacatcgatacttgtgtttggagattctagtgtcgatccagggaacaataatttcattaaaaccgaaatgaaagggaattttccaccttatggtgaaaatttcatcaaccataaacccaccggtagattatgcgatggattactcgctcccgattatattgcggaggccatgggttaccctcccataccggcttttcttgatccatccctaacccaagctgatctaactcgcggtgcaagttttgcctctgctggttctggctatgacgatctcacagctaatatatcaaacgtatggagtttcactacacaagccaattactttctacattacaagattcatctgactaaattggtcggtccattagagagcgctaaaatgataaataatgctatatttcttatgagtatgggatcaaatgactttcttcaaaattacttagtcgattttactcgacaaaagcaattcacggttgagcaatacatcgagtttctctcccaccgtatgctttacgacgccaagatgttgcataggcttggagctaaaaggttggtggtagtgggagttcctcccatgggatgcatgcctttaattaaatacctacgaggccaaaaaacttgtgtagatcaactaaaccaaatcgctttctcctttaacgccaaaatcatcaaaaatctagagcttcttcagtctaaaatcggtttgaaaaccatctacgttgatgcttattcgaccatccaagaagccattaaaaatccgagaaaatttggtttcgtcgaggcttcgctaggctgttgtggaacaggtacatacgaatatggagagacatgcaaagatatgcaagtatgcaaagatcctaccaaatacgttttttgggacgctgtccatccaacacaaagaatgtatcaaatcattgttaagaaggcaatcgcatccatcagtgaagagtttcttgtttagaaatattatatgtttgtattttactatcatgatttatgaaaaattctagatgtaattgaaaagcattcaaaatgttaaatttaatggttcaaatc

SEQ ID NO: 33734 - protein, 357 aa, Arabidopsis thaliana
  misc_feature (1)..(357): Ceres Seq. ID no. 13603980
MLLVAFVTLLVAVALQPLPSVLSLDVHLLRQLAAKHNVTSILVFGDSSVDPGNNNFIKTEMKGNFPPYGENFINHKPTGRLCDGLLAPDYIAEAMGYPPIPAFLDPSLTQADLTRGASFASAGSGYDDLTANISNVWSFTTQANYFLHYKIHLTKLVGPLESAKMINNAIFLMSMGSNDFLQNYLVDFTRQKQFTVEQYIEFLSHRMLYDAKMLHRLGAKRLVVVGVPPMGCMPLIKYLRGQKTCVDQLNQIAFSFNAKIIKNLELLQSKIGLKTIYVDAYSTIQEAIKNPRKFGFVEASLGCCGTGTYEYGETCKDMQVCKDPTKYVFWDAVHPTQRMYQIIVKKAIASISEEFLV

SEQ ID NO: 33735 - protein, 297 aa, Arabidopsis thaliana
  misc_feature (1)..(297): Ceres Seq. ID no. 13603981
MKGNFPPYGENFINHKPTGRLCDGLLAPDYIAEAMGYPPIPAFLDPSLTQADLTRGASFASAGSGYDDLTANISNVWSFTTQANYFLHYKIHLTKLVGPLESAKMINNAIFLMSMGSNDFLQNYLVDFTRQKQFTVEQYIEFLSHRMLYDAKMLHRLGAKRLVVVGVPPMGCMPLIKYLRGQKTCVDQLNQIAFSFNAKIIKNLELLQSKIGLKTIYVDAYSTIQEAIKNPRKFGFVEASLGCCGTGTYEYGETCKDMQVCKDPTKYVFWDAVHPTQRMYQIIVKKAIASISEEFLV

SEQ ID NO: 33736 - protein, 263 aa, Arabidopsis thaliana
  misc_feature (1)..(263): Ceres Seq. ID no. 13603982
MGYPPIPAFLDPSLTQADLTRGASFASAGSGYDDLTANISNVWSFTTQANYFLHYKIHLTKLVGPLESAKMINNAIFLMSMGSNDFLQNYLVDFTRQKQFTVEQYIEFLSHRMLYDAKMLHRLGAKRLVVVGVPPMGCMPLIKYLRGQKTCVDQLNQIAFSFNAKIIKNLELLQSKIGLKTIYVDAYSTIQEAIKNPRKFGFVEASLGCCGTGTYEYGETCKDMQVCKDPTKYVFWDAVHPTQRMYQIIVKKAIASISEEFLV

SEQ ID NO: 33737 - DNA, 1318 bp, Arabidopsis thaliana
  misc_feature (1)..(1318): Ceres Seq. ID no. 13603983
cagactactcatttgtctccactccaaactttcacaacaatgagaagtcatcacagacatttttcttcatatgtttccttcatcctcttcctattcctgttcttcatctccttctcatcctcaacatcaaaactcgaacccgcaaagtctgaacctaaaagaaaacattcagtttcagctattctcgtgttcggagattcaacagtggatccgggcaataacaactacattgacacagtattcaagtgtaattttccgccctatggactcgatttcagaaacaaaactccgaccggtagattttgcaacggtcgactcgtcacagattttatcgcttcatacattggtgtgaaggagaatgtgccaccgtatttggacccaaatcttggaataaatgagttaataagtggagttagctttgcttcagctggctctggatatgatcctctcactccaaccataactaacgtgatagacattccgactcagctagagtatttcagagaatacaagagaaaattggagggtaaaatgggaaaacaagaaatggaaaaacacatagaagaagctatgttttgtgtaagtgcaggaaccaacgatttcgtcattaattatttcacaattcccatacgaaggaagacttttactatcgaagcttatcaacaattcgttatttccaatctcaagcaatttatccagggtttgtggaaagaaggagcaagaaagataacagtggcaggtttaccaccgattgggtgtttgccgattgttataacattattctccggcgaagcattgaccaaccgtcgttgcattgaccgtttctccactgtggccacaaactacaatttcctcttacaaaaacaattggccctcatgcaagtgggtttggcccatcttggatccaaaatcttttacctcgacgtctataacccagtttatgaggtcattcgtgaccctcgaaaattcgggttcgaggaagtcttcagtggatgttgtggaagtggatacctagaggcatcgtttttgtgtaatccaaagtcatatgtgtgtcccaatacatctgcttatgtcttctttgactctatccatccaagtgagaagacttacttcagtctttttagatctctccgaccaatttatgattctattctcggttctttctgaaatttttaattaatattatgatcactattagctaattgataagttaatttcaatttacatacacctctttcttccattatgagtgacgaaatgtaatgttggtctatgtgttaatatttcagtttgaaatgcaaaataattagtgtacttg

SEQ ID NO: 33738 - protein, 388 aa, Arabidopsis thaliana
  misc_feature (1)..(388): Ceres Seq. ID no. 13603984
QTTHLSPLQTFTTMRSHHRHFSSYVSFILFLFLFFISFSSSTSKLEPAKSEPKRKHSVSAILVFGDSTVDPGNNNYIDTVFKCNFPPYGLDFRNKTPTGRFCNGRLVTDFIASYIGVKENVPPYLDPNLGINELISGVSFASAGSGYDPLTPTITNVIDIPTQLEYFREYKRKLEGKMGKQEMEKHIEEAMFCVSAGTNDFVINYFTIPIRRKTFTIEAYQQFVISNLKQFIQGLWKEGARKITVAGLPPIGCLPIVITLFSGEALTNRRCIDRFSTVATNYNFLLQKQLALMQVGLAHLGSKIFYLDVYNPVYEVIRDPRKFGFEEVFSGCCGSGYLEASFLCNPKSYVCPNTSAYVFFDSIHPSEKTYFSLFRSLRPIYDSILGSF

SEQ ID NO: 33739 - protein, 375 aa, Arabidopsis thaliana
  misc_feature (1)..(375): Ceres Seq. ID no. 13603985
MRSHHRHFSSYVSFILFLFLFFISFSSSTSKLEPAKSEPKRKHSVSAILVFGDSTVDPGNNNYIDTVFKCNFPPYGLDFRNKTPTGRFCNGRLVTDFIASYIGVKENVPPYLDPNLGINELISGVSFASAGSGYDPLTPTITNVIDIPTQLEYFREYKRKLEGKMGKQEMEKHIEEAMFCVSAGTNDFVINYFTIPIRRKTFTIEAYQQFVISNLKQFIQGLWKEGARKITVAGLPPIGCLPIVITLFSGEALTNRRCIDRFSTVATNYNFLLQKQLALMQVGLAHLGSKIFYLDVYNPVYEVIRDPRKFGFEEVFSGCCGSGYLEASFLCNPKSYVCPNTSAYVFFDSIHPSEKTYFSLFRSLRPIYDSILGSF

SEQ ID NO: 33740 - protein, 211 aa, Arabidopsis thaliana
  misc_feature (1)..(211): Ceres Seq. ID no. 13603986
MGKQEMEKHIEEAMFCVSAGTNDFVINYFTIPIRRKTFTIEAYQQFVISNLKQFIQGLWKEGARKITVAGLPPIGCLPIVITLFSGEALTNRRCIDRFSTVATNYNFLLQKQLALMQVGLAHLGSKIFYLDVYNPVYEVIRDPRKFGFEEVFSGCCGSGYLEASFLCNPKSYVCPNTSAYVFFDSIHPSEKTYFSLFRSLRPIYDSILGSF

SEQ ID NO: 33741 - DNA, 889 bp, Arabidopsis thaliana
  misc_feature (1)..(889): Ceres Seq. ID no. 13603987
agggttttcgtctctttcactcgtaaccggaagagaggacaagatcctccactaatttcacaaaaagctcatctttttattcgttttcgaatcgattcgttatctgggttcaagtatcaaattctctggtttcgtttttcgtttttgatttgttctctctctttcggaaaaagtttggttttttttttgtttgaaacaatgggaagaggcaagttcaagggtaaacctaccggccaacgccgattctctagtgctgctgatattcttgctggcacatctgctgcacgtcctcgatcattcaaacagaaagaagctgagtacgaagaagatgttgaagaagagtcagaggaggaatctgaagaagaatccgaagatgaagctgatgtgaagaagaaaggagctgaagctgttatcgaagttgataaccctaacagagtaagacaaaagaccttgaaagcaaaagacctcgatgctagtaaaaccactgaactctcaaggcgtgaaagagaggagctagagaagcagcgagctcatgagcgatacatgaggttgcaagagcaaggcaaaaccgaacaagcaaggaaggacttggatcgtttggctctgattcgccaacagagagaagaagctgccaagaagcgagaagaggaaaaagccgcaagagacgctaagaaagtcgaagggcgcaaatgagaagtgatcacactcaaaagacctgcctactatgcgattaagatgtgttgtttttactttgttctttttcgattgataaaagataaaacctctgctatttactctgttatctctcgattttaagttcggtttaaaaggattggatgtagttcaaaatataaactcgtttaagatttatgcgtggaagcttcctcag

SEQ ID NO: 33742 - protein, 230 aa, Arabidopsis thaliana
  misc_feature (1)..(230): Ceres Seq. ID no. 13603988
RVFVSFTRNRKRGQDPPLISQKAHLFIRFRIDSLSGFKYQILWFRFSFLICSLSFGKSLVFFLFETMGRGKFKGKPTGQRRFSSAADILAGTSAARPRSFKQKEAEYEEDVEEESEEESEEESEDEADVKKKGAEAVIEVDNPNRVRQKTLKAKDLDASKTTELSRREREELEKQRAHERYMRLQEQGKTEQARKDLDRLALIRQQREEAAKKREEEKAARDAKKVEGRK

SEQ ID NO: 33743 - protein, 164 aa, Arabidopsis thaliana
  misc_feature (1)..(164): Ceres Seq. ID no. 13603989
MGRGKFKGKPTGQRRFSSAADILAGTSAARPRSFKQKEAEYEEDVEEESEEESEEESEDEADVKKKGAEAVIEVDNPNRVRQKTLKAKDLDASKTTELSRREREELEKQRAHERYMRLQEQGKTEQARKDLDRLALIRQQREEAAKKREEEKAARDAKKVEGRK

SEQ ID NO: 33744 - DNA, 1430 bp, Arabidopsis thaliana
  misc_feature (1)..(1430): Ceres Seq. ID no. 13603990
aaattcaaaaaaaaatcttagatcaggtggaatctaccagagagcacgcgattctagatcgatccaccggtgagagacgccggagtttttatccccgcggcggagtaaaccatttcttcttcccgatgtatcagtgaagttaagtagtcgagagaggggataatgatggaagtggaaggatcgatgaatcgtgctcctgatcaatcatccttcttacgatcaagacgatccaaagctctgtatcagtttaagcagcagaaactcccagcttgtaagccagtcttaacaccaatatcggttataacagtgtttatgttaatgggttttgttttcattcccattggtctcattactcttcgtgcttctcgtgatgctattgaaattatagaccggtatgatgttgagtgcattcctgaagaatatagaaccaacaaactgttgtatataactgattcatctatcccaaagaattgtacgcgctacttgaaggtacaaaagtatatgaaagctcccatttttatctactaccagcttgataactactatcaaaaccatcgccggtatgtaaagagtagaagtgatcagcaactattacatggactggagtatagccacacaagttcttgtgaacccgaggagtcatctaatggtctcccaattgttccttgtgggttaattgcttggagtatgttcaatgatacatttacgttttctcgcgaaagaacaaaactgaatgtgagccggaataacattgcgtggaagagtgaccgcgagcacaagtttggaaagaatgtgtatcctatcaatttccagaacggaactttgattggtggagcaaagttggatccaaaaattccactaagtgaccaagaggactttatagtgtggatgcgagcagctgctttactaagcttccggaaattatatggaagaatcgaagaggacttggaaccaggaaaagttgttgaagtaaatttgatgaacaattacaacacttatagctttagtgggcagaagaagcttattctctccacatcaaattggttaggaggaagaaatgatttcctgggtatcacctatcttgtcgttggttcctcttccatagtcatatccatcatcttcatgttgctccatttgaaaaatccaaggccatacggtgacaattcttggaacaagaaaagcctttcaagttgagaagctgttacattctttctctaacagattcatattccaggttcatatatattcctacatactcaagagccatactttgtctatatatatatgatcatctaggtttaaggagtatataacgtatgtatgagcctatagttctagaaaactgataaggttcctctgttttctttacgatccttgtgtgttcggattgcgggttctaaagattcaacaaaaagataattgtttgaccc

SEQ ID NO: 33745 - protein, 343 aa, Arabidopsis thaliana
  misc_feature (1)..(343): Ceres Seq. ID no. 13603991
MMEVEGSMNRAPDQSSFLRSRRSKALYQFKQQKLPACKPVLTPISVITVFMLMGFVFIPIGLITLRASRDAIEIIDRYDVECIPEEYRTNKLLYITDSSIPKNCTRYLKVQKYMKAPIFIYYQLDNYYQNHRRYVKSRSDQQLLHGLEYSHTSSCEPEESSNGLPIVPCGLIAWSMFNDTFTFSRERTKLNVSRNNIAWKSDREHKFGKNVYPINFQNGTLIGGAKLDPKIPLSDQEDFIVWMRAAALLSFRKLYGRIEEDLEPGKVVEVNLMNNYNTYSFSGQKKLILSTSNWLGGRNDFLGITYLVVGSSSIVISIIFMLLHLKNPRPYGDNSWNKKSLSS

SEQ ID NO: 33746 - protein, 342 aa, Arabidopsis thaliana
  misc_feature (1)..(342): Ceres Seq. ID no. 13603992
MEVEGSMNRAPDQSSFLRSRRSKALYQFKQQKLPACKPVLTPISVITVFMLMGFVFIPIGLITLRASRDAIEIIDRYDVECIPEEYRTNKLLYITDSSIPKNCTRYLKVQKYMKAPIFIYYQLDNYYQNHRRYVKSRSDQQLLHGLEYSHTSSCEPEESSNGLPIVPCGLIAWSMFNDTFTFSRERTKLNVSRNNIAWKSDREHKFGKNVYPINFQNGTLIGGAKLDPKIPLSDQEDFIVWMRAAALLSFRKLYGRIEEDLEPGKVVEVNLMNNYNTYSFSGQKKLILSTSNWLGGRNDFLGITYLVVGSSSIVISIIFMLLHLKNPRPYGDNSWNKKSLSS

SEQ ID NO: 33747 - protein, 336 aa, Arabidopsis thaliana
  misc_feature (1)..(336): Ceres Seq. ID no. 13603993
MNRAPDQSSFLRSRRSKALYQFKQQKLPACKPVLTPISVITVFMLMGFVFIPIGLITLRASRDAIEIIDRYDVECIPEEYRTNKLLYITDSSIPKNCTRYLKVQKYMKAPIFIYYQLDNYYQNHRRYVKSRSDQQLLHGLEYSHTSSCEPEESSNGLPIVPCGLIAWSMFNDTFTFSRERTKLNVSRNNIAWKSDREHKFGKNVYPINFQNGTLIGGAKLDPKIPLSDQEDFIVWMRAAALLSFRKLYGRIEEDLEPGKVVEVNLMNNYNTYSFSGQKKLILSTSNWLGGRNDFLGITYLVVGSSSIVISIIFMLLHLKNPRPYGDNSWNKKSLSS

SEQ ID NO: 33748 - DNA, 1209 bp, Arabidopsis thaliana
  misc_feature (1)..(1209): Ceres Seq. ID no. 13603998
aaggaataaacttcgtgaagagaaatgactctagaagctttatcatcaaacggtcttttaaactttttgctctctgaaactctttcaccaactccattcaagtctctcgtcgatctcgagccattgccggaaaatgatgtcatcatatcgaagaacacaatttcggagatatctaatcaagaaccgccaccacagcgacaaccaccagctacgaatcgagggaagaagcggcggaggaggaagcctagggtttgcaaaaacgaggaagaagctgagaatcaacgaatgactcacattgccgtcgaaagaaatcgaagaagacaaatgaatcaacatctctctgtcttgcgatctctcatgcctcaaccttttgctcacaagggtgatcaagcttcaatagttggtggagccatagatttcatcaaagaacttgaacacaaattactatctcttgaagctcaaaaacatcataatgctaaattaaaccagtcggttacttcttcaacaagtcaagactcaaatggtgaacaagagaatcctcatcaaccatcttcactatctctatcgcagttctttcttcattcatacgatccgagccaagagaataggaacggctcaacaagctcggtgaaaacccctatggaagatcttgaggtgactctaatcgaaactcatgctaacatcagaatcttgtcgagaagaagaggtttccggtggagcacgttggccaccaccaaaccgccgcagctttcgaagctggtggcttctctacaatcgctgtccctctccattcttcaccttagtgtcacaacattggacaattatgctatttactccatcagcgctaaggtggaagagagttgccagctaagttcagtagatgacattgcaggagcagttcaccacatgctaagtatcattgaagaggagcctttttgttgctcatcaatgtcagaattaccatttgacttctctttgaatcactcaaatgtcactcattctctctgagaaatctcttttttgttgttgttattccttcttttaattttatcacatagcacatctttagtttttttttttcagaatgaagaaacacataagctttcttttaaaatcctaggttctttttctgactttgtaaaggctaaatgtgaatttataatggcacataacatattagttgttttactcttaattttatgcattttc

SEQ ID NO: 33749 - protein, 327 aa, Arabidopsis thaliana
  misc_feature (1)..(327): Ceres Seq. ID no. 13603999
MTLEALSSNGLLNFLLSETLSPTPFKSLVDLEPLPENDVIISKNTISEISNQEPPPQRQPPATNRGKKRRRRKPRVCKNEEEAENQRMTHIAVERNRRRQMNQHLSVLRSLMPQPFAHKGDQASIVGGAIDFIKELEHKLLSLEAQKHHNAKLNQSVTSSTSQDSNGEQENPHQPSSLSLSQFFLHSYDPSQENRNGSTSSVKTPMEDLEVTLIETHANIRILSRRRGFRWSTLATTKPPQLSKLVASLQSLSLSILHLSVTTLDNYAIYSISAKVEESCQLSSVDDIAGAVHHMLSIIEEEPFCCSSMSELPFDFSLNHSNVTHSL

SEQ ID NO: 33750 - protein, 240 aa, Arabidopsis thaliana
  misc_feature (1)..(240): Ceres Seq. ID no. 13604000
MTHIAVERNRRRQMNQHLSVLRSLMPQPFAHKGDQASIVGGAIDFIKELEHKLLSLEAQKHHNAKLNQSVTSSTSQDSNGEQENPHQPSSLSLSQFFLHSYDPSQENRNGSTSSVKTPMEDLEVTLIETHANIRILSRRRGFRWSTLATTKPPQLSKLVASLQSLSLSILHLSVTTLDNYAIYSISAKVEESCQLSSVDDIAGAVHHMLSIIEEEPFCCSSMSELPFDFSLNHSNVTHSL

SEQ ID NO: 33751 - protein, 227 aa, Arabidopsis thaliana
  misc_feature (1)..(227): Ceres Seq. ID no. 13604001
MNQHLSVLRSLMPQPFAHKGDQASIVGGAIDFIKELEHKLLSLEAQKHHNAKLNQSVTSSTSQDSNGEQENPHQPSSLSLSQFFLHSYDPSQENRNGSTSSVKTPMEDLEVTLIETHANIRILSRRRGFRWSTLATTKPPQLSKLVASLQSLSLSILHLSVTTLDNYAIYSISAKVEESCQLSSVDDIAGAVHHMLSIIEEEPFCCSSMSELPFDFSLNHSNVTHSL

SEQ ID NO: 33752 - DNA, 1109 bp, Arabidopsis thaliana
  misc_feature (1)..(1109): Ceres Seq. ID no. 13604002
tacattgtcgacattggtaggataagtaggactctttctcattgcttttcgcttcgtcttcttctctctaaaactctttctctgcaagaaaaccaatctctctctctttcactttcttaaaccctttatctctctaaaaccctcctttttaggtaaaaaagttttggtgctgactcaaaaaaggttgggtcttttactgcattttgaaatggcgattgaagattacgagaacccaaatcgagaaatcaaacctaagaacagaagattcatggaaggagagaatcagtggcctatatggctcaaacctttactaaaccaacacttttttgctcaatgcaagtttcatggacacttacctagaaccgaatgcaaaatgtattgcttagactgtaccaatgactcgttttgttctctctgtctttctgaacacgagaatcatcgtaccattcagataaggatatcatcttatcataatgtgacaaaggtcgatgagatacagaaatacttagacatatcaagcattcagacatatgtgatcaatagctcaaaggttttgttcttgaatgagaggcctcagtctaagcctggtaaaggttttactaatgcctgcatggtctgttatcgtggccttgccgaaaactgcttccgcttctgctctattggctgcaaggttgcaggaacatctggagtcttccagaagagagtgaagcatacaacgaatgactcagataattcaaacaacagttctggagtggagaataacagttctggagcagagaatggtaattcaaatctgcagagtctcagtccacctacacctcaatttcctcctcgttctctgcgaaagcgactaaggaagggaattcctcaccgagctccatttagttgagattgtgatcaagaaaaagaagaagaagcttgtgttacgtagtgctatggattagtcaaacaactagtaagtgtatatatatatatacaatatcttcttgtaaagttttggtgtgatgcaatgagactagacagtgagtggtttatggtgtttttatgactatttccttgttctaaattttgtttttgattagattatatgacaaaaatagataattagt

SEQ ID NO: 33753 - protein, 226 aa, Arabidopsis thaliana
  misc_feature (1)..(226): Ceres Seq. ID no. 13604003
MAIEDYENPNREIKPKNRRFMEGENQWPIWLKPLLNQHFFAQCKFHGHLPRTECKMYCLDCTNDSFCSLCLSEHENHRTIQIRISSYHNVTKVDEIQKYLDISSIQTYVINSSKVLFLNERPQSKPGKGFTNACMVCYRGLAENCFRFCSIGCKVAGTSGVFQKRVKHTTNDSDNSNNSSGVENNSSGAENGNSNLQSLSPPTPQFPPRSLRKRLRKGIPHRAPFS

SEQ ID NO: 33754 - protein, 206 aa, Arabidopsis thaliana
  misc_feature (1)..(206): Ceres Seq. ID no. 13604004
MEGENQWPIWLKPLLNQHFFAQCKFHGHLPRTECKMYCLDCTNDSFCSLCLSEHENHRTIQIRISSYHNVTKVDEIQKYLDISSIQTYVINSSKVLFLNERPQSKPGKGFTNACMVCYRGLAENCFRFCSIGCKVAGTSGVFQKRVKHTTNDSDNSNNSSGVENNSSGAENGNSNLQSLSPPTPQFPPRSLRKRLRKGIPHRAPFS

SEQ ID NO: 33755 - protein, 171 aa, Arabidopsis thaliana
  misc_feature (1)..(171): Ceres Seq. ID no. 13604005
MYCLDCTNDSFCSLCLSEHENHRTIQIRISSYHNVTKVDEIQKYLDISSIQTYVINSSKVLFLNERPQSKPGKGFTNACMVCYRGLAENCFRFCSIGCKVAGTSGVFQKRVKHTTNDSDNSNNSSGVENNSSGAENGNSNLQSLSPPTPQFPPRSLRKRLRKGIPHRAPFS

SEQ ID NO: 33756 - DNA, 783 bp, Arabidopsis thaliana
  misc_feature (1)..(783): Ceres Seq. ID no. 13604010
aaagaaaagatgttgtgtagaatggtggtggtgactggccggaaaaagaaacccggttcggttccggtttatctgaatgtatacgatctcacacccatcaatggctacgcttactggttaggacttgggatctatcactctggtgttgaagttcatggagttgaatatggttttggagctcacgatcattcgactaccgggatattcgaggtggaaccgaagcaatgtccgggtttcacatttaggaagtctatattgattggaagaactgatttagatcctgaaaacgttcgtgtctttatggagaaacttgcggaagaatatagtggaaacagttatcatttgattactaagaattgcaatcacttttgcaatgatgtttgtgtgcaactgactcgaagatcgatccctagttgggttaaccgtcttgctcgctttggtttgttttgcaactgtgttctgccggcggagttgaatgagactaaggtgaggcaggtgagatcaaaggaagagaagattccggaagtagagaagaagaaacttcggagtagatcaagtaggtttccacctggtccttcgctttcttcgtcgggttctttaaaccgaagcagaagaggagaaaggagaagacaatgtcttcctccatcaccaactgtgagtgtttagctctagtcctagtaaaattatacctttttgtttcgcaatttgattcggtagtaatgtttaagctacaagatatggattgaacaaacattttcttgatagtaatggtataagattttc

SEQ ID NO: 33757 - protein, 221 aa, Arabidopsis thaliana
  misc_feature (1)..(221): Ceres Seq. ID no. 13604011
KEKMLCRMVVVTGRKKKPGSVPVYLNVYDLTPINGYAYWLGLGIYHSGVEVHGVEYGFGAHDHSTTGIFEVEPKQCPGFTFRKSILIGRTDLDPENVRVFMEKLAEEYSGNSYHLITKNCNHFCNDVCVQLTRRSIPSWVNRLARFGLFCNCVLPAELNETKVRQVRSKEEKIPEVEKKKLRSRSSRFPPGPSLSSSGSLNRSRRGERRRQCLPPSPTVSV

SEQ ID NO: 33758 - protein, 218 aa, Arabidopsis thaliana
  misc_feature (1)..(218): Ceres Seq. ID no. 13604012
MLCRMVVVTGRKKKPGSVPVYLNVYDLTPINGYAYWLGLGIYHSGVEVHGVEYGFGAHDHSTTGIFEVEPKQCPGFTFRKSILIGRTDLDPENVRVFMEKLAEEYSGNSYHLITKNCNHFCNDVCVQLTRRSIPSWVNRLARFGLFCNCVLPAELNETKVRQVRSKEEKIPEVEKKKLRSRSSRFPPGPSLSSSGSLNRSRRGERRRQCLPPSPTVSV

SEQ ID NO: 33759 - protein, 214 aa, Arabidopsis thaliana
  misc_feature (1)..(214): Ceres Seq. ID no. 13604013
MVVVTGRKKKPGSVPVYLNVYDLTPINGYAYWLGLGIYHSGVEVHGVEYGFGAHDHSTTGIFEVEPKQCPGFTFRKSILIGRTDLDPENVRVFMEKLAEEYSGNSYHLITKNCNHFCNDVCVQLTRRSIPSWVNRLARFGLFCNCVLPAELNETKVRQVRSKEEKIPEVEKKKLRSRSSRFPPGPSLSSSGSLNRSRRGERRRQCLPPSPTVSV

SEQ ID NO: 33760 - DNA, 1727 bp, Arabidopsis thaliana
  misc_feature (1)..(1727): Ceres Seq. ID no. 13604018
tctgtgtctttttttttttttttggtgataattgaaacatatgaaacaatcgtcgtcatagaagcagcagagattcaccttctttctttatctttccctctcagaaacaggaaacaaaattcaaaaagaacaaaaaaaaaaaggtcaaaccaaaacgatggcgtttcatcacaatcatctctcacaagacctctccttcaatcatttcaccgaccaacaccaacctccacctccgcaaccgcctcctcctcctccgcaacagcaacaacatttccaagaagcaccgcctcctaattggttaaacacagcgcttcttcgttcctcagataacaacaataacttcctcaacctccacacagccaccgctaacaccacaaccgcaagcagctccgattctccttcctccgccgccgccgccgccgctgctaaccagtggctatctcgctcctcctctttcctccaacgaaacaacaacaacaacgcttccatagtcggagatgggatcgatgatgtcaccggaggagcagacactatgattcagggagagatgaaaaccggcggtggagaaaacaaaaacgacggcggaggagctacggcggcggatggagtagtgagctggcagaatgcgagacacaaggcggagatcctttcgcatcctctttacgagcagcttttgtcggcgcacgttgcttgtttgagaatcgcgactccggttgatcagcttccgagaatcgatgctcagcttgctcagtctcaacacgtcgtcgctaaatactcagctttaggcgccgccgctcaaggtctcgtcggcgacgataaagaacttgaccagttcatgacacattatgtgttgctactgtgttcatttaaagagcaattgcaacaacatgtgcgtgttcatgcaatggaagctgtgatggcttgttgggagattgagcagtctcttcaaagcttaacaggagtgtctcctggagaagggatgggagcaacaatgtctgacgatgaagatgaacaagtagagagtgatgctaatatgttcgatgggggattagatgtgttgggttttggtcctttgattcctactgagagtgagaggtcgttgatggaaagagttagacaagaacttaaacatgaactcaaacagggttacaaggagaagatagtagacataagagaggagatattaaggaagagaagagctgggaagttaccaggagataccacctctgttctcaaagcttggtggcaatctcattccaaatggccttaccctactgaggaagataaggcgaggttggtgcaagagacaggtttgcagctaaaacagataaacaattggttcatcaatcagagaaagaggaactggcatagcaatccatcttcttccactgtattgaagaacaaacgcaaaagcaatgcaggtgacaatagcggaagagagcggttcgcgtagaaacaacaaacatatgatgtgaattggggaggtggaagatgggatttgaaagcagggttttagggatttaaagttgagaattttatggaggagtttggattatacagagagaggggacagtattagaaagtaactttttgtgcaattacatagtaacgtagtttggttatgtgattatgcccatatattttattaagtagcacacaaaccaaaaagaaaatatgaaaactgaagatgcaggcttttgtttaatgttttttgtttgtttgtctgc

SEQ ID NO: 33761 - protein, 431 aa, Arabidopsis thaliana
  misc_feature (1)..(431): Ceres Seq. ID no. 13604019
MAFHHNHLSQDLSFNHFTDQHQPPPPQPPPPPPQQQQHFQEAPPPNWLNTALLRSSDNNNNFLNLHTATANTTTASSSDSPSSAAAAAAANQWLSRSSSFLQRNNNNNASIVGDGIDDVTGGADTMIQGEMKTGGGENKNDGGGATAADGVVSWQNARHKAEILSHPLYEQLLSAHVACLRIATPVDQLPRIDAQLAQSQHVVAKYSALGAAAQGLVGDDKELDQFMTHYVLLLCSFKEQLQQHVRVHAMEAVMACWEIEQSLQSLTGVSPGEGMGATMSDDEDEQVESDANMFDGGLDVLGFGPLIPTESERSLMERVRQELKHELKQGYKEKIVDIREEILRKRRAGKLPGDTTSVLKAWWQSHSKWPYPTEEDKARLVQETGLQLKQINNWFINQRKRNWHSNPSSSTVLKNKRKSNAGDNSGRERFA

SEQ ID NO: 33762 - protein, 306 aa, Arabidopsis thaliana
  misc_feature (1)..(306): Ceres Seq. ID no. 13604020
MIQGEMKTGGGENKNDGGGATAADGVVSWQNARHKAEILSHPLYEQLLSAHVACLRIATPVDQLPRIDAQLAQSQHVVAKYSALGAAAQGLVGDDKELDQFMTHYVLLLCSFKEQLQQHVRVHAMEAVMACWEIEQSLQSLTGVSPGEGMGATMSDDEDEQVESDANMFDGGLDVLGFGPLIPTESERSLMERVRQELKHELKQGYKEKIVDIREEILRKRRAGKLPGDTTSVLKAWWQSHSKWPYPTEEDKARLVQETGLQLKQINNWFINQRKRNWHSNPSSSTVLKNKRKSNAGDNSGRERFA

SEQ ID NO: 33763 - protein, 301 aa, Arabidopsis thaliana
  misc_feature (1)..(301): Ceres Seq. ID no. 13604021
MKTGGGENKNDGGGATAADGVVSWQNARHKAEILSHPLYEQLLSAHVACLRIATPVDQLPRIDAQLAQSQHVVAKYSALGAAAQGLVGDDKELDQFMTHYVLLLCSFKEQLQQHVRVHAMEAVMACWEIEQSLQSLTGVSPGEGMGATMSDDEDEQVESDANMFDGGLDVLGFGPLIPTESERSLMERVRQELKHELKQGYKEKIVDIREEILRKRRAGKLPGDTTSVLKAWWQSHSKWPYPTEEDKARLVQETGLQLKQINNWFINQRKRNWHSNPSSSTVLKNKRKSNAGDNSGRERFA

SEQ ID NO: 33764 - DNA, 1433 bp, Arabidopsis thaliana
  misc_feature (1)..(1433): Ceres Seq. ID no. 13604025
aattacattttacactcatctcgttctctcttccgtcaatatggaaggcgtcaccgtcgtgtctttcttccttcttttcatcgccaccgccatggccgccaagtccaccgtctccttccgtgacggcatgttaccaaacggagacttcgagctaggaccaaaaccatcagacatgaaaggaacagaaatactaaacaaactagcaataccaaactgggaagtcacaggattcgtcgaatacattaaatcaggacataaacaaggagacatgcttctcgttgttcccgccggtaaattcgctgtaagacttgggaacgaagcatcgatcaaacaaagacttaaagtggttaaaggaatgtattactcactcacttttagtgctgctagaacttgtgcacaagacgagagacttaacatatctgtagcacctgactccggtgtgattccgattcagacggtttatagtagtagtggttgggatttatatgcttgggcgtttcaagctgagagtgatgttgctgaagttgtgattcataatcctggtgttgaggaagatccagcttgtggtccacttattgatggtgttgctatgagatctctttaccctcctagaccaactaataagaacattttgaaaaacggaggatttgaagaaggtccattagtattacccggctcgacaactggagttttgatcccaccgtttatagaagacgaccactctcctttacctggatggatggtggagtctctcaaagctgtcaagtacgtagacgttgaacatttctcagtcccacagggtcgcagagctattgagcttgtagcgggtaaagagagtgccatcgctcaagtggttcggactgtcattgggaagacttacgtgctgtcttttgcggttggagacgccaacaatgcttgcaaaggatcaatggtggttgaggcttttgcaggaaaagatacacttaaggtcccttacgagtcgaaaggcacaggagggtttaaacgagcttctattcgatttgtggcggtttcgacccgatcaagaattatgttctacagcactttctatgccatgaggagcgatgatttctcgtcattgtgtgggcctgtgatcgatgatgtcaagcttataagcgttcgtaaaccatagatgaatcaccaatcctattacaagaaaatgcatcgtgtggtcttcttttattttccttaaactgtctttggtgtgtgttggattttattgaaacgagaaggtgaaaaaaacagagttttatttacgagagttagggttttatataggcagatgggcctttgcttatattgtattttcttgtatgagaaggcaaaagaaacgttgcctatatcttatgtatctaggccttttaatttttatggaagagttacaaaacttacaataaagttgtatgcatatttta

SEQ ID NO: 33765 - protein, 382 aa, Arabidopsis thaliana
  misc_feature (1)..(382): Ceres Seq. ID no. 13604026
ITFYTHLVLSSVNMEGVTVVSFFLLFIATAMAAKSTVSFRDGMLPNGDFELGPKPSDMKGTEILNKLAIPNWEVTGFVEYIKSGHKQGDMLLVVPAGKFAVRLGNEASIKQRLKVVKGMYYSLTFSAARTCAQDERLNISVAPDSGVIPIQTVYSSSGWDLYAWAFQAESDVAEVVIHNPGVEEDPACGPLIDGVAMRSLYPPRPTNKNILKNGGFEEGPLVLPGSTTGVLIPPFIEDDHSPLPGWMVESLKAVKYVDVEHFSVPQGRRAIELVAGKESAIAQVVRTVIGKTYVLSFAVGDANNACKGSMVVEAFAGKDTLKVPYESKGTGGFKRASIRFVAVSTRSRIMFYSTFYAMRSDDFSSLCGPVIDDVKLISVRKP

SEQ ID NO: 33766 - protein, 369 aa, Arabidopsis thaliana
  misc_feature (1)..(369): Ceres Seq. ID no. 13604027
MEGVTVVSFFLLFIATAMAAKSTVSFRDGMLPNGDFELGPKPSDMKGTEILNKLAIPNWEVTGFVEYIKSGHKQGDMLLVVPAGKFAVRLGNEASIKQRLKVVKGMYYSLTFSAARTCAQDERLNISVAPDSGVIPIQTVYSSSGWDLYAWAFQAESDVAEVVIHNPGVEEDPACGPLIDGVAMRSLYPPRPTNKNILKNGGFEEGPLVLPGSTTGVLIPPFIEDDHSPLPGWMVESLKAVKYVDVEHFSVPQGRRAIELVAGKESAIAQVVRTVIGKTYVLSFAVGDANNACKGSMVVEAFAGKDTLKVPYESKGTGGFKRASIRFVAVSTRSRIMFYSTFYAMRSDDFSSLCGPVIDDVKLISVRKP

SEQ ID NO: 33767 - protein, 352 aa, Arabidopsis thaliana
  misc_feature (1)..(352): Ceres Seq. ID no. 13604028
MAAKSTVSFRDGMLPNGDFELGPKPSDMKGTEILNKLAIPNWEVTGFVEYIKSGHKQGDMLLVVPAGKFAVRLGNEASIKQRLKVVKGMYYSLTFSAARTCAQDERLNISVAPDSGVIPIQTVYSSSGWDLYAWAFQAESDVAEVVIHNPGVEEDPACGPLIDGVAMRSLYPPRPTNKNILKNGGFEEGPLVLPGSTTGVLIPPFIEDDHSPLPGWMVESLKAVKYVDVEHFSVPQGRRAIELVAGKESAIAQVVRTVIGKTYVLSFAVGDANNACKGSMVVEAFAGKDTLKVPYESKGTGGFKRASIRFVAVSTRSRIMFYSTFYAMRSDDFSSLCGPVIDDVKLISVRKP

SEQ ID NO: 33768 - DNA, 2153 bp, Arabidopsis thaliana
  misc_feature (1)..(2153): Ceres Seq. ID no. 13604033
gagacaaaaaggaaaaaaacaaaattaaaattaggaaagttaaaataattttcctgcaaatttcttctttctcagaaatctaaaaaaaaacaatgaagaaaacaccgtaacgaatcataaaatttctcaaaatccaaactctgttttttgttcttcctcttccagatttggtttctttttttgaaaaactctctagcttcagttttttttttctctctctctctctctctaggaatgtttttgttcgtggatactggaatcatgagaataagattttgaaggagaaagcaagatccatgttctttgtcggagaatttagggctaatatgtggatttgagcttctttgattcccaatttgtgaaagttttgaaatttttgggaaagagagaatgtttaagcagtttctgagtaaacttccgaggaagtcttcaaaatctgattcaggagagctgaatcgttcgagttcgggtccggtatcgtctccggttcagagatccggtactagtggtggtggttcgggtccggttcgatctaactcagggaagcgtatgtcatctgctgtgttcccagctagtgttgttgctggtattgagcctttggtaccgtttaaggatgtaccaagctctgagaagttgaatctctttgtgagtaaagttagtctctgttgtgtgacatttgatttctctgaccctggtaaaaactctatagagaaagatgttaaaaggcagacattgttggagcttttggattttgtagcttcagggtctgttaagttcactgagccagctattcttgcaatgtgtagaatgtgtgctgttaatctctttagggtctttcctccgaattatcggtctagttctggtggcgaaaacgatgatgatgaaccgatgtttgaccctgcttggcctcatttgcagattgtgtatgatttgttgcttaagtttatcacttctccgtgtcttgatgctaaagtggcaaaaaagtatttagatcatgctttcattgtgaggttgcttgacttgtttgattcggaggatcctagagaacgggagtgtttgaagacgattctgcatcgggtatatgggaagttcatggttcataggccatttgtacgcaagtccatgagcaatatattctaccggtttgtgtttgagacagagaagcatagcggaatcgctgagcttttggagattttcgggagtatagtgagtggatttgcgttgcctttgaaagaagagcataagatcttcttgtggagagtgttgattccattgcacaagcctaaatctgttggaaactactttcagcagctttcttattgtatcactcagttcatagataaagagccgaaactaggcagtgttgtgataaagggtttgttgaagttctggcctatcacgaatagtcagaaggaagtgatgtttctcggggaggtcgaagaaattgtagaagcaatgagtgtgatggagtttcaaaagatcatggtccctttgttcttgcggattgcttgttgtgtcaccagttcccactttcaggtttctgaaagagctttattcttgtggaacaacgatcaaattgtaaacttgattggacataaccggcaagccatcctaccaatcatgttcactgctttagaaaagaatgctcagaaccactggaaccaatccgtgctaaacttaaccttaaacgtacgaaaaatgttctgcgaaatggacgaggctctgttcatgtcttgccacgcccgctttaaggaggacgaagcaaagcaatgttctgctgcggaaaagaggaaagaagtatgggcaaggctagagaatgcagcaagtatgaagccgataacaggaaagactgctgttctggtaactcctcgagcaacctccatcgcctgctaaatagcgtttaaaccaattcacagacagtttatccaaagcaacaacatcgagaagatgatggagtggctgttgcttaagctatagtcttgggaacttttcatcgaggttgatctctgtaatattatataactttgatgttgttagctgtgtgggttttaatgctaattctattgctttcttttaaagcaatgaaaccatgctgcagatttttatcaaactctttgtatcaatcaattaagtttatatatcctttttctttc

SEQ ID NO: 33769 - protein, 500 aa, Arabidopsis thaliana
  misc_feature (1)..(500): Ceres Seq. ID no. 13604034
MFKQFLSKLPRKSSKSDSGELNRSSSGPVSSPVQRSGTSGGGSGPVRSNSGKRMSSAVFPASVVAGIEPLVPFKDVPSSEKLNLFVSKVSLCCVTFDFSDPGKNSIEKDVKRQTLLELLDFVASGSVKFTEPAILAMCRMCAVNLFRVFPPNYRSSSGGENDDDEPMFDPAWPHLQIVYDLLLKFITSPCLDAKVAKKYLDHAFIVRLLDLFDSEDPRERECLKTILHRVYGKFMVHRPFVRKSMSNIFYRFVFETEKHSGIAELLEIFGSIVSGFALPLKEEHKIFLWRVLIPLHKPKSVGNYFQQLSYCITQFIDKEPKLGSVVIKGLLKFWPITNSQKEVMFLGEVEEIVEAMSVMEFQKIMVPLFLRIACCVTSSHFQVSERALFLWNNDQIVNLIGHNRQAILPIMFTALEKNAQNHWNQSVLNLTLNVRKMFCEMDEALFMSCHARFKEDEAKQCSAAEKRKEVWARLENAASMKPITGKTAVLVTPRATSIAC

SEQ ID NO: 33770 - protein, 447 aa, Arabidopsis thaliana
  misc_feature (1)..(447): Ceres Seq. ID no. 13604035
MSSAVFPASVVAGIEPLVPFKDVPSSEKLNLFVSKVSLCCVTFDFSDPGKNSIEKDVKRQTLLELLDFVASGSVKFTEPAILAMCRMCAVNLFRVFPPNYRSSSGGENDDDEPMFDPAWPHLQIVYDLLLKFITSPCLDAKVAKKYLDHAFIVRLLDLFDSEDPRERECLKTILHRVYGKFMVHRPFVRKSMSNIFYRFVFETEKHSGIAELLEIFGSIVSGFALPLKEEHKIFLWRVLIPLHKPKSVGNYFQQLSYCITQFIDKEPKLGSVVIKGLLKFWPITNSQKEVMFLGEVEEIVEAMSVMEFQKIMVPLFLRIACCVTSSHFQVSERALFLWNNDQIVNLIGHNRQAILPIMFTALEKNAQNHWNQSVLNLTLNVRKMFCEMDEALFMSCHARFKEDEAKQCSAAEKRKEVWARLENAASMKPITGKTAVLVTPRATSIAC

SEQ ID NO: 33771 - protein, 364 aa, Arabidopsis thaliana
  misc_feature (1)..(364): Ceres Seq. ID no. 13604036
MCRMCAVNLFRVFPPNYRSSSGGENDDDEPMFDPAWPHLQIVYDLLLKFITSPCLDAKVAKKYLDHAFIVRLLDLFDSEDPRERECLKTILHRVYGKFMVHRPFVRKSMSNIFYRFVFETEKHSGIAELLEIFGSIVSGFALPLKEEHKIFLWRVLIPLHKPKSVGNYFQQLSYCITQFIDKEPKLGSVVIKGLLKFWPITNSQKEVMFLGEVEEIVEAMSVMEFQKIMVPLFLRIACCVTSSHFQVSERALFLWNNDQIVNLIGHNRQAILPIMFTALEKNAQNHWNQSVLNLTLNVRKMFCEMDEALFMSCHARFKEDEAKQCSAAEKRKEVWARLENAASMKPITGKTAVLVTPRATSIAC

SEQ ID NO: 33772 - DNA, 1164 bp, Arabidopsis thaliana
  misc_feature (1)..(1164): Ceres Seq. ID no. 13604064
atctctctcctctctttgtctctctcgcttctgtgatttgggctttttcagatgggaaatgcgaacggcaaagacgaagacgccgccgccggtagcggtggtgcagatgttacctcgtcctcggcgagatctaatggcggcgatccttctgcacgcagtcgtcaccgtcgtccttcttcagactctatgagcagttctcctcccggaagtcctgctcgatctccatctcctttcttattcgctcctcagcccacattgttattccacgttacatcttacaacatttgctcacctatgcgtcacctcttccattgtttaggcttaacatgtgtacctaatggctgcatttcgtgtcggatggttcccgtggctccattgcagagagcaaacgcccctcctcctaataacatccaatggaaccaatcacagagagtttttgataatcccccagagcaaggaatccctaccatcattacatggaaccaaggaggtaatgatgtggcggtggaaggatcatgggacaattggagatcaaggaagaagctgcagaaatcagggaaagaccactcgattctctttgtccttccatctggcatataccactacaaggtgattgtggacggtgaatccaaatacatcccagatttaccctttgtagcagacgaagttggcaatgtctgtaacattctcgatgttcataactttgtgccagaaaacccagaaagcatagtggagtttgaggcgccaccatcacctgatcatagctacggtcaaaccctaccagccgcagaagattacgcgaaagagccactggcggtgccacctcagcttcatctaacacttcttggcactactgaagagacagccatagccacaaagcctcaacatgtggtgcttaaccatgtgttcatagagcaaggatggactcctcaatccatagtagctttgggtttaacccacaggttcgagtctaagtacataactgttgtcctctacaaaccgctcacacggtaaccctaaaaattcagtgccacattgttctctctctttctttctttttcatctctcaattatgtgaaaacatgttctttgttcatagtgactagtgagtgcccaacatttgagtttattaacctctttcttacctggtttgtggtgcttgtg

SEQ ID NO: 33773 - protein, 320 aa, Arabidopsis thaliana
  misc_feature (1)..(320): Ceres Seq. ID no. 13604065
MGNANGKDEDAAAGSGGADVTSSSARSNGGDPSARSRHRRPSSDSMSSSPPGSPARSPSPFLFAPQPTLLFHVTSYNICSPMRHLFHCLGLTCVPNGCISCRMVPVAPLQRANAPPPNNIQWNQSQRVFDNPPEQGIPTIITWNQGGNDVAVEGSWDNWRSRKKLQKSGKDHSILFVLPSGIYHYKVIVDGESKYIPDLPFVADEVGNVCNILDVHNFVPENPESIVEFEAPPSPDHSYGQTLPAAEDYAKEPLAVPPQLHLTLLGTTEETAIATKPQHVVLNHVFIEQGWTPQSIVALGLTHRFESKYITVVLYKPLTR

SEQ ID NO: 33774 - protein, 275 aa, Arabidopsis thaliana
  misc_feature (1)..(275): Ceres Seq. ID no. 13604066
MSSSPPGSPARSPSPFLFAPQPTLLFHVTSYNICSPMRHLFHCLGLTCVPNGCISCRMVPVAPLQRANAPPPNNIQWNQSQRVFDNPPEQGIPTIITWNQGGNDVAVEGSWDNWRSRKKLQKSGKDHSILFVLPSGIYHYKVIVDGESKYIPDLPFVADEVGNVCNILDVHNFVPENPESIVEFEAPPSPDHSYGQTLPAAEDYAKEPLAVPPQLHLTLLGTTEETAIATKPQHVVLNHVFIEQGWTPQSIVALGLTHRFESKYITVVLYKPLTR

SEQ ID NO: 33775 - protein, 239 aa, Arabidopsis thaliana
  misc_feature (1)..(239): Ceres Seq. ID no. 13604067
MRHLFHCLGLTCVPNGCISCRMVPVAPLQRANAPPPNNIQWNQSQRVFDNPPEQGIPTIITWNQGGNDVAVEGSWDNWRSRKKLQKSGKDHSILFVLPSGIYHYKVIVDGESKYIPDLPFVADEVGNVCNILDVHNFVPENPESIVEFEAPPSPDHSYGQTLPAAEDYAKEPLAVPPQLHLTLLGTTEETAIATKPQHVVLNHVFIEQGWTPQSIVALGLTHRFESKYITVVLYKPLTR

SEQ ID NO: 33776 - DNA, 1075 bp, Arabidopsis thaliana
  misc_feature (1)..(1075): Ceres Seq. ID no. 13604068
atggctccctcgtttctaagcgtcgcaagattcgttgaggcactactccgccggagattctcctccgctggtctctccttacaaaccctatccatcgactccgaaaccaccatacagttctggggaccaccaccgtcttcatcatcggaaaatacacaaaaaccgtcgctcctcctcctccatggttttggaccttccgctgtatggcaatggagccatcaggtcaagccactctctcacttctttcgtctctacgtccccgacctagtcttcttcggcggctcctcttcctccggtgagaaccggtcggagatgtttcaagcgttgtgcatggggaagcttatggagaagctcgaggtcgagagattcagtgtcgttgggacgagctacggcgggtttgtggcgtataatatggcgaaaatgtttccggagaaagtggagaaggtggtgcttgcgagctccggtgttaatttgcggaggagtgacaacgaggcgtttatcgctagggctaagtgccaccgtatcaaggaggtgatgcttcctgcttctgcaacagatcttaggagattctctgggatggtttcttctaagagactcgattatgtcccagattttgtcttgaacgacttttgccagaaaatgtattcggaaaagagagaggaaaaagcagaacttctcgaggggctgagtattgggaaggatgacaaaaccaacgtttctccaattcaacaggatgtaatgctgatatggggtgagcaagatcaagtttttcctttaaaaatggcccatgacctcaaagagatgttggggactaaggcgacgctaaaagttatacaaaagacatcacatatacctcaaacggagaagtccaaagaattcaatggctttgtcatgtctttcttattacctccttctccatcaccataaatgtaacatccatattaaactataaattacaatttttttctgatttcgtcgatgttagaagtatttatgatgcatatgtcagttcatgatacatttgagaatatttgtaacattgttattgatgatgcatatgtcaaattagttcacc

SEQ ID NO: 33777 - protein, 308 aa, Arabidopsis thaliana
  misc_feature (1)..(308): Ceres Seq. ID no. 13604069
MAPSFLSVARFVEALLRRRFSSAGLSLQTLSIDSETTIQFWGPPPSSSSENTQKPSLLLLHGFGPSAVWQWSHQVKPLSHFFRLYVPDLVFFGGSSSSGENRSEMFQALCMGKLMEKLEVERFSVVGTSYGGFVAYNMAKMFPEKVEKVVLASSGVNLRRSDNEAFIARAKCHRIKEVMLPASATDLRRFSGMVSSKRLDYVPDFVLNDFCQKMYSEKREEKAELLEGLSIGKDDKTNVSPIQQDVMLIWGEQDQVFPLKMAHDLKEMLGTKATLKVIQKTSHIPQTEKSKEFNGFVMSFLLPPSPSP

SEQ ID NO: 33778 - protein, 204 aa, Arabidopsis thaliana
  misc_feature (1)..(204): Ceres Seq. ID no. 13604070
MFQALCMGKLMEKLEVERFSVVGTSYGGFVAYNMAKMFPEKVEKVVLASSGVNLRRSDNEAFIARAKCHRIKEVMLPASATDLRRFSGMVSSKRLDYVPDFVLNDFCQKMYSEKREEKAELLEGLSIGKDDKTNVSPIQQDVMLIWGEQDQVFPLKMAHDLKEMLGTKATLKVIQKTSHIPQTEKSKEFNGFVMSFLLPPSPSP

SEQ ID NO: 33779 - protein, 198 aa, Arabidopsis thaliana
  misc_feature (1)..(198): Ceres Seq. ID no. 13604071
MGKLMEKLEVERFSVVGTSYGGFVAYNMAKMFPEKVEKVVLASSGVNLRRSDNEAFIARAKCHRIKEVMLPASATDLRRFSGMVSSKRLDYVPDFVLNDFCQKMYSEKREEKAELLEGLSIGKDDKTNVSPIQQDVMLIWGEQDQVFPLKMAHDLKEMLGTKATLKVIQKTSHIPQTEKSKEFNGFVMSFLLPPSPSP

SEQ ID NO: 33780 - DNA, 1792 bp, Arabidopsis thaliana
  misc_feature (1)..(1792): Ceres Seq. ID no. 13604072
aaagagtctttgtcattgtcttccttcttcttcctttttctctccccccccccattatcttcggcgaatcatgaatctagggttttgttttctcccataaccctagattttcttccatcaatcttatatttttctcatttcttcttctccgttttagctcatctcccgattcatctcgatttccatggagggagcgggagagacgacgacgtcggaggggcatttgacttcggcagcagcttttgtggaagggggaattcaagatgcttgtgatgatgcttgtagcatttgtcttgaatccttctgcgaaagcgatccttctactttgactagttgcaagcatgagtatcatcttcaatgcattcttgagtggtgtcaaagaagctcacagtgccctatgtgttggcaatcaattagtctcaaagaccccacaagtcaggagttgcttgaggctgtggaacaggagaggaatttccgcttcaatccaactagaaatgccaccatatttcgtcatccaactcttggtgattttgaattacaacatcttccagtgggggtggataatgctgagattgaagaacgaatcattcagcacttggctgctgctgctgctatgggacgagcaagacatggggtaagaagggaaggccacagaagcaggtcgtcaagtcaaggacatcaacagttcatggtgttctcttcgcaacctaatgcttcttctcctccacctcatcctcccatgccttcttctccatctcagagagatgagagtgacacagtgtcaaaccttcctcacaatgctttaggggagggttctcatcagtcaaacacgcagccaccaacttcttctcatccccgccaggtttctccctcagcatctgattcaaacagcaggcctcttaatcaatcttccccaagtgaacaagatagagctggaccatcagaactccagtcattttcggaatcacttaagtctcgattaaacgctgtctccacgagatacaaagaatcgatatcaaagaatacaaggaactggaaagatagacttttttctcgcaacacgtccatggcagatcttggctctgaggttaaaagagaggtcagtgccggaatcgccactgtgtcccgcatgatggaacgtttagaaacgagagaaaacagtagacccagcactgcatctgtatcagatgtctctgaaaatcacactcctgaaacaaacaatgagcacaatagagcagcagcgggtgatgaacattctgtgaatgaaagaggtgttaaagaaacatgtgcgactggttctggttcaagctaataagtgagtgccagcatcttgttggcaaagagagaggaagatgttgtccattgtgaaattctgataatatatatatacagagtcagaagtctcaaaagtgtggagcataggaagaaggttattattgataaagaaaaagagttttccgattatcaataaataagaaaagttatatatgaccaaaaggaggccttaaagacgcctctttctgtgttatgtcaaacaaacaaaaaaaaaactaaagagaaaaattagagtaaaagacctgtgtggggttgttggttatttggtcggtctgttgtaaattcacattgtcgttcacattacggatttctatgaatttctacttatgtatcttcaaaaacttggtctagcaaaaccaatttaatgtatcgattccagtgtactatagttatgatggtgtcgtgtgacttctgtcgaacaaacaaaattatggtgcttaataatggttttcgattt

SEQ ID NO: 33781 - protein, 375 aa, Arabidopsis thaliana
  misc_feature (1)..(375): Ceres Seq. ID no. 13604073
MEGAGETTTSEGHLTSAAAFVEGGIQDACDDACSICLESFCESDPSTLTSCKHEYHLQCILEWCQRSSQCPMCWQSISLKDPTSQELLEAVEQERNFRFNPTRNATIFRHPTLGDFELQHLPVGVDNAEIEERIIQHLAAAAAMGRARHGVRREGHRSRSSSQGHQQFMVFSSQPNASSPPPHPPMPSSPSQRDESDTVSNLPHNALGEGSHQSNTQPPTSSHPRQVSPSASDSNSRPLNQSSPSEQDRAGPSELQSFSESLKSRLNAVSTRYKESISKNTRNWKDRLFSRNTSMADLGSEVKREVSAGIATVSRMMERLETRENSRPSTASVSDVSENHTPETNNEHNRAAAGDEHSVNERGVKETCATGSGSS

SEQ ID NO: 33782 - protein, 304 aa, Arabidopsis thaliana
  misc_feature (1)..(304): Ceres Seq. ID no. 13604074
MCWQSISLKDPTSQELLEAVEQERNFRFNPTRNATIFRHPTLGDFELQHLPVGVDNAEIEERIIQHLAAAAAMGRARHGVRREGHRSRSSSQGHQQFMVFSSQPNASSPPPHPPMPSSPSQRDESDTVSNLPHNALGEGSHQSNTQPPTSSHPRQVSPSASDSNSRPLNQSSPSEQDRAGPSELQSFSESLKSRLNAVSTRYKESISKNTRNWKDRLFSRNTSMADLGSEVKREVSAGIATVSRMMERLETRENSRPSTASVSDVSENHTPETNNEHNRAAAGDEHSVNERGVKETCATGSGSS

SEQ ID NO: 33783 - protein, 232 aa, Arabidopsis thaliana
  misc_feature (1)..(232): Ceres Seq. ID no. 13604075
MGRARHGVRREGHRSRSSSQGHQQFMVFSSQPNASSPPPHPPMPSSPSQRDESDTVSNLPHNALGEGSHQSNTQPPTSSHPRQVSPSASDSNSRPLNQSSPSEQDRAGPSELQSFSESLKSRLNAVSTRYKESISKNTRNWKDRLFSRNTSMADLGSEVKREVSAGIATVSRMMERLETRENSRPSTASVSDVSENHTPETNNEHNRAAAGDEHSVNERGVKETCATGSGSS

SEQ ID NO: 33784 - DNA, 1387 bp, Arabidopsis thaliana
  misc_feature (1)..(1387): Ceres Seq. ID no. 13604088
atggaaagtcttgtggagcagttgaaatccatcaagaaggataagttttcttgtaatgataagtggttaacccttaagcttcaaatcaacaaaaactttgagctccctgagcaagtgagaagagaccacactgagaagaaaaatccttcaggttatcgaaaattcccggattttactctttgggcggtggccgatttcttacgcgctctttttgtggcgactgttgtatacgcgcgagccttcatggacacgaaggcggttggagtttctaaggatacggcggcgtcgatggaagcgtcgacggtgtttcctgggtttaaattctcgccgacggatgtggagttgatttcgtattacctgaagcggaagatggatggcttggagaggtccgttgaggttataccggaccttgagatttacaatttcgagccttgggatttacccgataagtcgattgtgaaatctgatagcgagtggttcttcttctgtgcgcgtgggaaaaagtatccacatggttcacagaacaggagagcaacgaagatgggatactggaaagcaactgggaaagagcgtgatgtgaagtctggttctgaggtcattggaacaaagaggacgcttgttttccatattggtcgtgcaccaaaaggcgaaagaactgactggattatgcacgagtactgcgtgaaaggagtatctctggatgatgctatggttgtttgccgggttaggaggaacaaagaatacaatagtggtacaagtcagaaggcaccaaagccaaattcatcagccgagaagcatgcgaaagtccaaaatggcgctacgagttcagggagcccgtctgattgggacaacttggttgatttttacctagcaggtgaatcaggggagaaactactcgctgagatggcagagtcatcagaaaatctacaggtggataatgacgaggatttctttgcggatatcctaagagacgaaatcatcaatctcgatgaagcggtgatgacagggaacacaccaaacgaagtgccaacactagaatcagcatcaatggagataagggtacttcctttaccaaacatgatagacaaacaaatgtcatcactgttagaggaaagaccatcacagaagaagaaaggaaaagacgccacggaatcattgtcgagctgcttcgtgggtttatactcgatcaaatcagtgaacaaggcacgatgggatgttattataggtgtagtggctctgatagcaatgttgttttatctagaataagaggcttatggaagtagcgaaaaacagtgtcctagctatgtttgtatcatcttttctcggacattgacaaggattatatgatgtttttgtgtaaacggtttatgttttacacttctacttc

SEQ ID NO: 33785 - protein, 421 aa, Arabidopsis thaliana
  misc_feature (1)..(421): Ceres Seq. ID no. 13604089
MESLVEQLKSIKKDKFSCNDKWLTLKLQINKNFELPEQVRRDHTEKKNPSGYRKFPDFTLWAVADFLRALFVATVVYARAFMDTKAVGVSKDTAASMEASTVFPGFKFSPTDVELISYYLKRKMDGLERSVEVIPDLEIYNFEPWDLPDKSIVKSDSEWFFFCARGKKYPHGSQNRRATKMGYWKATGKERDVKSGSEVIGTKRTLVFHIGRAPKGERTDWIMHEYCVKGVSLDDAMVVCRVRRNKEYNSGTSQKAPKPNSSAEKHAKVQNGATSSGSPSDWDNLVDFYLAGESGEKLLAEMAESSENLQVDNDEDFFADILRDEIINLDEAVMTGNTPNEVPTLESASMEIRVLPLPNMIDKQMSSLLEERPSQKKKGKDATESLSSCFVGLYSIKSVNKARWDVIIGVVALIAMLFYLE

SEQ ID NO: 33786 - protein, 340 aa, Arabidopsis thaliana
  misc_feature (1)..(340): Ceres Seq. ID no. 13604090
MDTKAVGVSKDTAASMEASTVFPGFKFSPTDVELISYYLKRKMDGLERSVEVIPDLEIYNFEPWDLPDKSIVKSDSEWFFFCARGKKYPHGSQNRRATKMGYWKATGKERDVKSGSEVIGTKRTLVFHIGRAPKGERTDWIMHEYCVKGVSLDDAMVVCRVRRNKEYNSGTSQKAPKPNSSAEKHAKVQNGATSSGSPSDWDNLVDFYLAGESGEKLLAEMAESSENLQVDNDEDFFADILRDEIINLDEAVMTGNTPNEVPTLESASMEIRVLPLPNMIDKQMSSLLEERPSQKKKGKDATESLSSCFVGLYSIKSVNKARWDVIIGVVALIAMLFYLE

SEQ ID NO: 33787 - protein, 325 aa, Arabidopsis thaliana
  misc_feature (1)..(325): Ceres Seq. ID no. 13604091
MEASTVFPGFKFSPTDVELISYYLKRKMDGLERSVEVIPDLEIYNFEPWDLPDKSIVKSDSEWFFFCARGKKYPHGSQNRRATKMGYWKATGKERDVKSGSEVIGTKRTLVFHIGRAPKGERTDWIMHEYCVKGVSLDDAMVVCRVRRNKEYNSGTSQKAPKPNSSAEKHAKVQNGATSSGSPSDWDNLVDFYLAGESGEKLLAEMAESSENLQVDNDEDFFADILRDEIINLDEAVMTGNTPNEVPTLESASMEIRVLPLPNMIDKQMSSLLEERPSQKKKGKDATESLSSCFVGLYSIKSVNKARWDVIIGVVALIAMLFYLE

SEQ ID NO: 33788 - DNA, 913 bp, Arabidopsis thaliana
  misc_feature (1)..(913): Ceres Seq. ID no. 13604104
ttttggttcctttaataatcatttctttcttttatataaacctaagatacgttccccatatttcactcactcaagaagacatctaaagccatcaaaaatatatccatagaagcttcatcgaaatggcgaatcaagcagctgctgcagcattcttccttttcgctttagccgtcttctccaacttggagctctcagcttcttcacttgtcagtggcaagatctcttgccttgactgccaccgcgatttcgacttctcaggcattaaggtcctccttaaatgcgacggagagaagaaacaaataaccgcggtggcagctgcagacggatctttccggtcagtgcttccaacggctgacaaaaaaggctccataaattgtcttgcaaagctcttgggaggccctgagcaactctatgctcacaaacacaacttggtctctgaattggtcaaatctaaacacgattccaaagttttaactacctcaaacccacttgccttctctctctcctgccccaaaccatcccgagatgatatcggaagtatgatcggagattccaagactattaattttccgggggcaggaggttttggattcccacctgccagcttctttcccttcttaccaatcattggtatcccatgatttaaataagtgttacttttaagtccttaaagacatatgtatacatatgttttgttgtttacgtgaatgaagccagccaagacaagacacaaatatttagcaaattacattactttgtttagtgagatataaggtttgtttatgtgctaagaaaatgttatttattggctttatttagtttaaatcagttgcttttgtatcaagtttgtaataagaaggttgggttaatccaacaacatacgctttattgtgaacattcatgcttctatgat

SEQ ID NO: 33789 - protein, 172 aa, Arabidopsis thaliana
  misc_feature (1)..(172): Ceres Seq. ID no. 13604105
MANQAAAAAFFLFALAVFSNLELSASSLVSGKISCLDCHRDFDFSGIKVLLKCDGEKKQITAVAAADGSFRSVLPTADKKGSINCLAKLLGGPEQLYAHKHNLVSELVKSKHDSKVLTTSNPLAFSLSCPKPSRDDIGSMIGDSKTINFPGAGGFGFPPASFFPFLPIIGIP

SEQ ID NO: 33790 - DNA, 1226 bp, Arabidopsis thaliana
  misc_feature (1)..(1226): Ceres Seq. ID no. 13604118
gttcacatgcacccgcaaaaaaaaaaactaattttttttcttttttcttctcctcatcttcagagttttgagatttgtgattgcctccatgcaagagctgaattagccgaatctggatgtcttattctgaaaaaacgacggtggatccacttctgagagatttggatgagaagaaagagagtttccggcgaaacgtggtgtctctggctacggagctgaagcaagtgaggggccgtttggtttctcaagaacaatcttttcttaaagagaccattactagaaaagaagcagagaaaaggggaaagaatatggaaatggagatttgtaaattgcagaagagactggaagaaaggaattgtcagcttgaagcttctgcatctgctgctgataagtttatcaaagagttggaggaatttagattaaagcttgatacaaccaagcaaaccgcagaggcaagtgctgattctgctcaatctacaaagatccaatgctcaatgctaaagcaacaacttgacgacaaaacacgttctctcagagaacaagaagaccgtatgactcagcttggtcatcagcttgatgatctacagagaggtctgagcttgagagagtgctcagaaaagcagcttagagaagaagttaggagaatcgagcgtgaggttactgaggccattgcaaaagcgggaataggtggcatggacagcgagctccagaaacttctagaagatgtgtctccaatgaaatttgagaggatgaataggctagttgaagtaaaagacgaagagattacaaaactgaaagatgagataaggttaatgtcaggtcaatggaaacataagactaaggaactcgaatctcagctggagaaacagagaagaactgatcaagatttgaagaagaaggtattgaagctagagttctgtttacaagaagctcgaagccagacaagaaagctgcagaggaaaggggaaagaagggacatggagatcaaagagataagagatcttatatcggagaagcaaaaccttaacaatgagtcttgggataaacagaagttctgggacaattcagggttcaagattgttgtatcaatgtctatgttgatgttagtggtagtctccaagagatgatgaattttgtaatgtataaatttagttgcagatagttgatgaggataatctaactcatgtatgtgtcgtcttcaggtctaatataacagccatgtactt

SEQ ID NO: 33791 - protein, 336 aa, Arabidopsis thaliana
  misc_feature (1)..(336): Ceres Seq. ID no. 13604119
MSYSEKTTVDPLLRDLDEKKESFRRNVVSLATELKQVRGRLVSQEQSFLKETITRKEAEKRGKNMEMEICKLQKRLEERNCQLEASASAADKFIKELEEFRLKLDTTKQTAEASADSAQSTKIQCSMLKQQLDDKTRSLREQEDRMTQLGHQLDDLQRGLSLRECSEKQLREEVRRIEREVTEAIAKAGIGGMDSELQKLLEDVSPMKFERMNRLVEVKDEEITKLKDEIRLMSGQWKHKTKELESQLEKQRRTDQDLKKKVLKLEFCLQEARSQTRKLQRKGERRDMEIKEIRDLISEKQNLNNESWDKQKFWDNSGFKIVVSMSMLMLVVVSKR

SEQ ID NO: 33792 - protein, 272 aa, Arabidopsis thaliana
  misc_feature (1)..(272): Ceres Seq. ID no. 13604120
MEMEICKLQKRLEERNCQLEASASAADKFIKELEEFRLKLDTTKQTAEASADSAQSTKIQCSMLKQQLDDKTRSLREQEDRMTQLGHQLDDLQRGLSLRECSEKQLREEVRRIEREVTEAIAKAGIGGMDSELQKLLEDVSPMKFERMNRLVEVKDEEITKLKDEIRLMSGQWKHKTKELESQLEKQRRTDQDLKKKVLKLEFCLQEARSQTRKLQRKGERRDMEIKEIRDLISEKQNLNNESWDKQKFWDNSGFKIVVSMSMLMLVVVSKR

SEQ ID NO: 33793 - protein, 270 aa, Arabidopsis thaliana
  misc_feature (1)..(270): Ceres Seq. ID no. 13604121
MEICKLQKRLEERNCQLEASASAADKFIKELEEFRLKLDTTKQTAEASADSAQSTKIQCSMLKQQLDDKTRSLREQEDRMTQLGHQLDDLQRGLSLRECSEKQLREEVRRIEREVTEAIAKAGIGGMDSELQKLLEDVSPMKFERMNRLVEVKDEEITKLKDEIRLMSGQWKHKTKELESQLEKQRRTDQDLKKKVLKLEFCLQEARSQTRKLQRKGERRDMEIKEIRDLISEKQNLNNESWDKQKFWDNSGFKIVVSMSMLMLVVVSKR

SEQ ID NO: 33794 - DNA, 2290 bp, Arabidopsis thaliana
  misc_feature (1)..(2290): Ceres Seq. ID no. 13604130
atctttctctctttcggatcattctctcctctgattccgaatcgggtaaattattatggattcttcttcttcgtcttcctccgccgccgcacgccgccgtatcaacgctatccactctcacctcgtcacctcttctcgctcttcccctctcctccgctccaatcccaccgccggcgagttctgtcttgataatggctatagtgttgttcttcccgagaaactgaatactggcagttggaacgtctacagatctgcaaaatctccgttcaagctcgttagcagattcccagatcatcctgacatcgctactctccatgacaattttgagcatgctgttcatgattttcgagattacaagtatttaggaactcgtgttcgtgtcgacggaactgttggagactacaaatggatgacatatggagaagctggtacagcaagaactgctttaggttctggtttggttcatcacggaatccccatgggatcttctgttggaatttacttcatcaatcgcccagagtggctcattgttgatcatgcttgttcttcttattcttatgtgtctgttcctttgtatgatactcttggtcctgatgctgtgaaatttattgtcaatcatgcaactgtgcaagccatattttgtgtggcagagactttaaactctttacttagctgtttgtctgagatgccaagtgtacgcctggtggtggttgttggagggttaattgaatctttaccctcgcttccctcatcatcaggagtgaaagttgtatcctattcggtgttactgaatcagggtcgtagtaaccctcagcgattttttccaccaaaacccgatgatgttgcaaccatatgctatacaagcggaacaactgggacacccaagggagtcgtattaactcatgcaaacttgattgccaatgttgctggctccagctttagtgtgaagtttttctcttcagatgtttacatttcgtatcttccacttgctcacatttacgaacgagctaatcagatcctaacagtgtactttggagttgctgttggattctaccaaggggacaatatgaaactactggatgatttggctgctctgagacctactgtatttagcagtgtccctcgattatacaatagaatatatgctggtatcattaatgcagtaaaaacctctggtggtctgaaagagagactcttcaatgctgcctataatgcaaagaagcaggctctcttgaatggaaagagtgcttctcccatatgggacaggttggtatttaataaaataaaggacagacttggagggcgggttcgttttatgacgtctggtgcttcacctctctctcctgaagtgatggaatttttgaaagtatgctttggaggaagggtaacagagggatatggaatgactgaaacatcttgtgttataagtggaatggacgagggtgataacctcactggacatgttggctctcctaatccagcttgtgaagtaaagcttgtggatgtcccagaaatgaactatacatcagcggatcagccccatccccgtggcgaaatatgtgttaggggtcctatcatttttacaggctattacaaagatgaaattcaaacgaaagaggtgattgatgaagatggatggcttcacactggagatataggtctgtggctgccgggaggacgtctaaaaattattgacagaaagaagaacatcttcaaattggcgcagggggagtatatagctccagagaaaattgaaaacgtctatgccaaatgcaaatttgtgggccagtgcttcatatatggtgatagctttaattcatcattggtagctgttgtatcggttgatccagatgtgctgaaaagctgggcagcttcagaaggcattaagggaggagatctgagagaattgtgtaataatccgagagtgaaagcagcagtactatctgacatggacactgttggaagagaagctcagttgagaggcttcgagtttgcaaaggctgtgacattggtgctggaaccatttactctggaaaatggcttgttgactccgacgttcaagattaagagaccacaagcaaaggaatatttcgcagaagcaataacaaacatgtacaaggagcttggtgcttctgatccctctgctaatagaggtttgtgatgatggtataatcgtgtgattaataaaaagcctacgcaaaagttgtttctcccacaaattgtattcttttttgttttcttgctacatatttattgaatagtaaaggtaataaaggtgctacattacatt

SEQ ID NO: 33795 - protein, 701 aa, Arabidopsis thaliana
  misc_feature (1)..(701): Ceres Seq. ID no. 13604131
MDSSSSSSSAAARRRINAIHSHLVTSSRSSPLLRSNPTAGEFCLDNGYSVVLPEKLNTGSWNVYRSAKSPFKLVSRFPDHPDIATLHDNFEHAVHDFRDYKYLGTRVRVDGTVGDYKWMTYGEAGTARTALGSGLVHHGIPMGSSVGIYFINRPEWLIVDHACSSYSYVSVPLYDTLGPDAVKFIVNHATVQAIFCVAETLNSLLSCLSEMPSVRLVVVVGGLIESLPSLPSSSGVKVVSYSVLLNQGRSNPQRFFPPKPDDVATICYTSGTTGTPKGVVLTHANLIANVAGSSFSVKFFSSDVYISYLPLAHIYERANQILTVYFGVAVGFYQGDNMKLLDDLAALRPTVFSSVPRLYNRIYAGIINAVKTSGGLKERLFNAAYNAKKQALLNGKSASPIWDRLVFNKIKDRLGGRVRFMTSGASPLSPEVMEFLKVCFGGRVTEGYGMTETSCVISGMDEGDNLTGHVGSPNPACEVKLVDVPEMNYTSADQPHPRGEICVRGPIIFTGYYKDEIQTKEVIDEDGWLHTGDIGLWLPGGRLKIIDRKKNIFKLAQGEYIAPEKIENVYAKCKFVGQCFIYGDSFNSSLVAVVSVDPDVLKSWAASEGIKGGDLRELCNNPRVKAAVLSDMDTVGREAQLRGFEFAKAVTLVLEPFTLENGLLTPTFKIKRPQAKEYFAEAITNMYKELGASDPSANRGL

SEQ ID NO: 33796 - protein, 583 aa, Arabidopsis thaliana
  misc_feature (1)..(583): Ceres Seq. ID no. 13604132
MTYGEAGTARTALGSGLVHHGIPMGSSVGIYFINRPEWLIVDHACSSYSYVSVPLYDTLGPDAVKFIVNHATVQAIFCVAETLNSLLSCLSEMPSVRLVVVVGGLIESLPSLPSSSGVKVVSYSVLLNQGRSNPQRFFPPKPDDVATICYTSGTTGTPKGVVLTHANLIANVAGSSFSVKFFSSDVYISYLPLAHIYERANQILTVYFGVAVGFYQGDNMKLLDDLAALRPTVFSSVPRLYNRIYAGIINAVKTSGGLKERLFNAAYNAKKQALLNGKSASPIWDRLVFNKIKDRLGGRVRFMTSGASPLSPEVMEFLKVCFGGRVTEGYGMTETSCVISGMDEGDNLTGHVGSPNPACEVKLVDVPEMNYTSADQPHPRGEICVRGPIIFTGYYKDEIQTKEVIDEDGWLHTGDIGLWLPGGRLKIIDRKKNIFKLAQGEYIAPEKIENVYAKCKFVGQCFIYGDSFNSSLVAVVSVDPDVLKSWAASEGIKGGDLRELCNNPRVKAAVLSDMDTVGREAQLRGFEFAKAVTLVLEPFTLENGLLTPTFKIKRPQAKEYFAEAITNMYKELGASDPSANRGL

SEQ ID NO: 33797 - protein, 560 aa, Arabidopsis thaliana
  misc_feature (1)..(560): Ceres Seq. ID no. 13604133
MGSSVGIYFINRPEWLIVDHACSSYSYVSVPLYDTLGPDAVKFIVNHATVQAIFCVAETLNSLLSCLSEMPSVRLVVVVGGLIESLPSLPSSSGVKVVSYSVLLNQGRSNPQRFFPPKPDDVATICYTSGTTGTPKGVVLTHANLIANVAGSSFSVKFFSSDVYISYLPLAHIYERANQILTVYFGVAVGFYQGDNMKLLDDLAALRPTVFSSVPRLYNRIYAGIINAVKTSGGLKERLFNAAYNAKKQALLNGKSASPIWDRLVFNKIKDRLGGRVRFMTSGASPLSPEVMEFLKVCFGGRVTEGYGMTETSCVISGMDEGDNLTGHVGSPNPACEVKLVDVPEMNYTSADQPHPRGEICVRGPIIFTGYYKDEIQTKEVIDEDGWLHTGDIGLWLPGGRLKIIDRKKNIFKLAQGEYIAPEKIENVYAKCKFVGQCFIYGDSFNSSLVAVVSVDPDVLKSWAASEGIKGGDLRELCNNPRVKAAVLSDMDTVGREAQLRGFEFAKAVTLVLEPFTLENGLLTPTFKIKRPQAKEYFAEAITNMYKELGASDPSANRGL

SEQ ID NO: 33798 - DNA, 1109 bp, Arabidopsis thaliana
  misc_feature (1)..(1109): Ceres Seq. ID no. 13604134
aaagtccaccactagctcgaactctctcctctcttaaacttatagacaagaatcaatcagtcacacgtctataccacgatttgctcacaaaatctttggcttccaccaaagattataagcagagatcattcacttactcgtatcaatagatcaaatcttcatcacaatagaagaaatggttttagagacggtttcaaagacggaaccaccaccgttgcttggacctcgtatctccttctcatctgatttatctgacggtggagatttcatctgcatcacccccgtaatgtgtaaggaagatgtcgtcaaagggtcagtgaaagtctccgactttgagttcttgtcgtcggaaaatgtgagtccacagagaatgcttaccgccgatgaactcttctccgaaggtaaattgcttcctttttggcaagtaaagcactcagagaagcttaaaaacattactttgaagacgaacgaagaggaagaagcagagaaacgtaaagtggaagtgaagaagaaagatcaggagattaacaatagagataacagagtgacttggtttatagacgaagatccgtctcctcgtcctcccaagtgtaccgttctttggaaagagcttttgagattgaagaaacagaggaatccgtcttcttcgccggtgacggcgaggacagtgtcgtctttgtctccgtcgtcgtccacgtcatcatcaagttcacttgaggacgcagcgaagagagaggagaaagagaaagaagggaagagaggtaagaaaggattagagagaacgagatcggcgagtatgaggataaggccaatgattcatgttcctatttgcactccttctaaatcctctcttcctttgcctcctctgtttcctctttcgcttaagaaaaacagagtagagagacgcgcctagaagatttgatctatctttggattgaaaaaaacaattattggttgaatttgttcagattctcaagtgttaactcatgtggtctaatgcatgtggttaagtgatgtttttcagatgtattatgtgtatgctttatggcttgagatttaatgtgtgacagtgttaagaaattctagtaagaaccgttcctctgttcttc

SEQ ID NO: 33799 - protein, 245 aa, Arabidopsis thaliana
  misc_feature (1)..(245): Ceres Seq. ID no. 13604135
MVLETVSKTEPPPLLGPRISFSSDLSDGGDFICITPVMCKEDVVKGSVKVSDFEFLSSENVSPQRMLTADELFSEGKLLPFWQVKHSEKLKNITLKTNEEEEAEKRKVEVKKKDQEINNRDNRVTWFIDEDPSPRPPKCTVLWKELLRLKKQRNPSSSPVTARTVSSLSPSSSTSSSSSLEDAAKREEKEKEGKRGKKGLERTRSASMRIRPMIHVPICTPSKSSLPLPPLFPLSLKKNRVERRA

SEQ ID NO: 33800 - protein, 208 aa, Arabidopsis thaliana
  misc_feature (1)..(208): Ceres Seq. ID no. 13604136
MCKEDVVKGSVKVSDFEFLSSENVSPQRMLTADELFSEGKLLPFWQVKHSEKLKNITLKTNEEEEAEKRKVEVKKKDQEINNRDNRVTWFIDEDPSPRPPKCTVLWKELLRLKKQRNPSSSPVTARTVSSLSPSSSTSSSSSLEDAAKREEKEKEGKRGKKGLERTRSASMRIRPMIHVPICTPSKSSLPLPPLFPLSLKKNRVERRA

SEQ ID NO: 33801 - protein, 180 aa, Arabidopsis thaliana
  misc_feature (1)..(180): Ceres Seq. ID no. 13604137
MLTADELFSEGKLLPFWQVKHSEKLKNITLKTNEEEEAEKRKVEVKKKDQEINNRDNRVTWFIDEDPSPRPPKCTVLWKELLRLKKQRNPSSSPVTARTVSSLSPSSSTSSSSSLEDAAKREEKEKEGKRGKKGLERTRSASMRIRPMIHVPICTPSKSSLPLPPLFPLSLKKNRVERRA

SEQ ID NO: 33802 - DNA, 1838 bp, Arabidopsis thaliana
  misc_feature (1)..(1838): Ceres Seq. ID no. 13604150
aaaacttaaaccgatctatcaagcaagtggttcctctctctctctacctctcgtttttggccaacgtcgtcgtcttcacgatccacgacgattcagttcttgagttccggcgattatcggtctctcacttctggttccgttgaacccctcatttctcttctcgcccgtgctctcaaattccgatatttgcccctgtgattcgaaaccctaatttcgcctatcaatctggaaaatctctcaattcgaagactttagcagcgcaaagatactctatccgggtaataagatcgaagaaaccatcaatttcttaccaaagtcgtgattcttggatctcgtctttgtttgatggacacaattagggtttccaaggaggttcctggatcttcgaaatcgaccgcacagtcgctcacggagtcgacctctcgcacggaaaccatcaatggctcccacgaattcaagatcagcggctactctttggtcaaaggcatggggattggcaaatacgttgcctcggatactttcatggtcggtggatactcctgggccatctacttctacccagatggaaagagtccagaggataattctgtctacgtgtctctcttcatagcccttgcgagtgaaggagccgatgttagggctttgtttgagcttaccctcgtggatcagagcggtaacgaaaggcacaaagttcatagccattttggtagaactctcgaaagcggaccctatactcttaaatatcgagggagtatgtggggatacaaacgatttttcaagaggtctcttttggagtcatcggactatctgaaggacaatggtctcttggtccggtgttgtgttggagtggtgaagtcacgcacagaaggaccgaggtgttacaatatcccggtgccggtttctggcttgggtcagcagtttggaaagcttttggaaagtgggaaaggagctgacgttactttcgaagttgatggagaaacatttcctgctcacaaattggttcttgcagcacgttctgcagttttcagggcacagctttttggcccgttgagaagtgaaaataccaattgtataatcatagaagacgtacaagcccctattttcaagatgttgcttcattttatctactgggatgaaatgcctgatatgcaagacttaatcggcacagacttgaaatgggcatcaactcttgtggctcagcatctgcttgcagctgcagaccgttatgctcttgagcggcttagaacaatatgcgagtcaaaactctgtgaaggaatcagcataaatacggtagcaaccaccttggctcttgcagagcagcatcattgtttccagctgaaagccgcctgcctcaaatttatagctttgccagaaaacctgaaagctgtgatggaaacggatgggtttgattatctgaaggaaagctgcccgtccctactaagtgagctattggagtatgtggctaggctgagtgagcactctttaacatcatcagggcatcgaaaggagttatttgctgatggttgtgacttaaatgggagacgtgtgaagcaacggttacattagcaactaattgagagagagagagagagagaggtcacttcgagagcctgagaagatgatggtgaagtaaacagaattttagaagagtaaagatttgtgtatttgtcattgtaaaaggattagtggttgatctgtgttgttcagctagctaatagagtgaaatgttgggtttttttcttttcttttctcttttgttttcccaggattttatgaccagaaccggttctctcaaggaaaaagtttcatgtgacttcattgataaatttggacttgcc

SEQ ID NO: 33803 - protein, 406 aa, Arabidopsis thaliana
  misc_feature (1)..(406): Ceres Seq. ID no. 13604151
MDTIRVSKEVPGSSKSTAQSLTESTSRTETINGSHEFKISGYSLVKGMGIGKYVASDTFMVGGYSWAIYFYPDGKSPEDNSVYVSLFIALASEGADVRALFELTLVDQSGNERHKVHSHFGRTLESGPYTLKYRGSMWGYKRFFKRSLLESSDYLKDNGLLVRCCVGVVKSRTEGPRCYNIPVPVSGLGQQFGKLLESGKGADVTFEVDGETFPAHKLVLAARSAVFRAQLFGPLRSENTNCIIIEDVQAPIFKMLLHFIYWDEMPDMQDLIGTDLKWASTLVAQHLLAAADRYALERLRTICESKLCEGISINTVATTLALAEQHHCFQLKAACLKFIALPENLKAVMETDGFDYLKESCPSLLSELLEYVARLSEHSLTSSGHRKELFADGCDLNGRRVKQRLH

SEQ ID NO: 33804 - protein, 359 aa, Arabidopsis thaliana
  misc_feature (1)..(359): Ceres Seq. ID no. 13604152
MGIGKYVASDTFMVGGYSWAIYFYPDGKSPEDNSVYVSLFIALASEGADVRALFELTLVDQSGNERHKVHSHFGRTLESGPYTLKYRGSMWGYKRFFKRSLLESSDYLKDNGLLVRCCVGVVKSRTEGPRCYNIPVPVSGLGQQFGKLLESGKGADVTFEVDGETFPAHKLVLAARSAVFRAQLFGPLRSENTNCIIIEDVQAPIFKMLLHFIYWDEMPDMQDLIGTDLKWASTLVAQHLLAAADRYALERLRTICESKLCEGISINTVATTLALAEQHHCFQLKAACLKFIALPENLKAVMETDGFDYLKESCPSLLSELLEYVARLSEHSLTSSGHRKELFADGCDLNGRRVKQRLH

SEQ ID NO: 33805 - protein, 347 aa, Arabidopsis thaliana
  misc_feature (1)..(347): Ceres Seq. ID no. 13604153
MVGGYSWAIYFYPDGKSPEDNSVYVSLFIALASEGADVRALFELTLVDQSGNERHKVHSHFGRTLESGPYTLKYRGSMWGYKRFFKRSLLESSDYLKDNGLLVRCCVGVVKSRTEGPRCYNIPVPVSGLGQQFGKLLESGKGADVTFEVDGETFPAHKLVLAARSAVFRAQLFGPLRSENTNCIIIEDVQAPIFKMLLHFIYWDEMPDMQDLIGTDLKWASTLVAQHLLAAADRYALERLRTICESKLCEGISINTVATTLALAEQHHCFQLKAACLKFIALPENLKAVMETDGFDYLKESCPSLLSELLEYVARLSEHSLTSSGHRKELFADGCDLNGRRVKQRLH

SEQ ID NO: 33806 - DNA, 1412 bp, Arabidopsis thaliana
  misc_feature (1)..(1412): Ceres Seq. ID no. 13604158
aaagcgatccagttgctgtgggaagcgataatggaggcgacgaagagagaaagacggagagaagatgacgacggcgaaaaagcttcaccggaatcactcgttcttccaccagagatcattacagaaattcttctccgattaccagccaaatcgatcgggcgattcaggtgcgtatcaaagctcttttgcactttatcgtcagatccagggttcgcgaagattcacctcgatctgatccttcgaaacgaatccgtaagatcgctccaccgtaagctcattgtgtcttcacataatctgtactcgttagatttcaattcgatcggtgacggaattagggatttagcggctgtggaacacaattatcctcttaaagacgatccaagcattttctctgagatgattaggaattacgtgggggaccatctgtacgatgatcgtcgcgtgatgcttaagctgaatgcgaaatcgtatcgaagaaactgggttgagatcgttggatcttccaatggtttagtgtgtatctctcctggtgaaggagctgttttcttgtataatccaactaccggagattccaagagattacctgaaaattttcgtcccaaatctgtagaatacgaaagagataatttccaaacttatggatttggtttcgatggtctcactgatgattacaaattggtgaagcttgttgctaccagtgaagatattctcgatgctagtgtctattccttgaaggctgactcatggagacggatctgcaatttgaattatgagcacaacgatggctcctacacgtccggtgtgcatttcaacggtgcgattcactgggtgttcacagagagtaggcacaaccaaagagtggttgtagcatttgatattcaaaccgaggagtttcgagagatgccagtgcctgatgaagctgaagattgttcccataggtttagcaactttgtggtcggaagtctcaatggacgtctctgtgtggtcaatagttgctacgatgtgcatgatgatatatgggtgatgagtgagtacggtgaagctaaatcctggagcagaattcgaatcaacttgttgtataggtcgatgaaaccgctctgttcgactaagaacgatgaagaggttcttctggagcttgatggagacctggtgttgtacaactttgaaaccaatgcatcgagtaatctaggaatttgtggggttaagctcagtgacgggttcgaggcaaatacatacgtagagagcctcatatcacccaactcttatggtatagagagctgaggaagtctgctttttgctaagatataataaaccaacattcggattagaaatgttttagaaacataatcatgtaatatgtatcatgtaattaacaacgaatggtcaatgggtattttaagtttctttctcct

SEQ ID NO: 33807 - protein, 426 aa, Arabidopsis thaliana
  misc_feature (1)..(426): Ceres Seq. ID no. 13604159
KAIQLLWEAIMEATKRERRREDDDGEKASPESLVLPPEIITEILLRLPAKSIGRFRCVSKLFCTLSSDPGFAKIHLDLILRNESVRSLHRKLIVSSHNLYSLDFNSIGDGIRDLAAVEHNYPLKDDPSIFSEMIRNYVGDHLYDDRRVMLKLNAKSYRRNWVEIVGSSNGLVCISPGEGAVFLYNPTTGDSKRLPENFRPKSVEYERDNFQTYGFGFDGLTDDYKLVKLVATSEDILDASVYSLKADSWRRICNLNYEHNDGSYTSGVHFNGAIHWVFTESRHNQRVVVAFDIQTEEFREMPVPDEAEDCSHRFSNFVVGSLNGRLCVVNSCYDVHDDIWVMSEYGEAKSWSRIRINLLYRSMKPLCSTKNDEEVLLELDGDLVLYNFETNASSNLGICGVKLSDGFEANTYVESLISPNSYGIES

SEQ ID NO: 33808 - protein, 416 aa, Arabidopsis thaliana
  misc_feature (1)..(416): Ceres Seq. ID no. 13604160
MEATKRERRREDDDGEKASPESLVLPPEIITEILLRLPAKSIGRFRCVSKLFCTLSSDPGFAKIHLDLILRNESVRSLHRKLIVSSHNLYSLDFNSIGDGIRDLAAVEHNYPLKDDPSIFSEMIRNYVGDHLYDDRRVMLKLNAKSYRRNWVEIVGSSNGLVCISPGEGAVFLYNPTTGDSKRLPENFRPKSVEYERDNFQTYGFGFDGLTDDYKLVKLVATSEDILDASVYSLKADSWRRICNLNYEHNDGSYTSGVHFNGAIHWVFTESRHNQRVVVAFDIQTEEFREMPVPDEAEDCSHRFSNFVVGSLNGRLCVVNSCYDVHDDIWVMSEYGEAKSWSRIRINLLYRSMKPLCSTKNDEEVLLELDGDLVLYNFETNASSNLGICGVKLSDGFEANTYVESLISPNSYGIES

SEQ ID NO: 33809 - protein, 294 aa, Arabidopsis thaliana
  misc_feature (1)..(294): Ceres Seq. ID no. 13604161
MIRNYVGDHLYDDRRVMLKLNAKSYRRNWVEIVGSSNGLVCISPGEGAVFLYNPTTGDSKRLPENFRPKSVEYERDNFQTYGFGFDGLTDDYKLVKLVATSEDILDASVYSLKADSWRRICNLNYEHNDGSYTSGVHFNGAIHWVFTESRHNQRVVVAFDIQTEEFREMPVPDEAEDCSHRFSNFVVGSLNGRLCVVNSCYDVHDDIWVMSEYGEAKSWSRIRINLLYRSMKPLCSTKNDEEVLLELDGDLVLYNFETNASSNLGICGVKLSDGFEANTYVESLISPNSYGIES

SEQ ID NO: 33810 - DNA, 1047 bp, Arabidopsis thaliana
  misc_feature (1)..(1047): Ceres Seq. ID no. 13604162
aaattactacgattgctataatgtcgatgtctcggctcggattgttgttgttcgtcgctatattgctcgtcttgcttcagtcttccacttgtctgattagttctccaagttctatcatcaatccttctaaagtcaaacaggtttcgtcgaagcccagggcatttgtgtatgaaggttttttgacggacttggaatgtgatcatctaatctctcttgcgaaagagaatctgcagagatctgcggttgctgataacgataatggcgagagtcaagtcagtgatgttcgtaccagctccggcacttttatctccaaaggaaaggatcctattgtttccggtatcgaggacaagctctcaacatggacatttctcccaaaagaaaacggggaagaccttcaggtattgagatatgagcacggtcagaaatatgatgctcactttgactacttccacgacaaagtcaacattgcccgtggtggacaccgcatagcaacggttctcttgtatctgtccaatgtcacaaagggtggagaaactgttttccccgatgcacaggaattctctcgccgctcgctttctgagaataaagacgatctttctgattgtgcaaagaaaggaatcgctgtgaaaccgaagaaagggaatgctctgttgttcttcaacctccaacaagacgcaatcccagacccctttagccttcacggaggttgtccagtgatcgaaggagagaaatggtcggctactaagtggatccacgtggactcattcgataagatattgacacatgatggtaactgtactgacgtaaacgagagctgtgagagatgggcagtgcttggagaatgtggaaagaatccagagtatatggttggaactccagagatccctgggaattgcagacgtagctgtaaagcttgttaaagactttaaactcctctttttctctgtaacattaaaagtttttttttcttgatcgagtttcattttcttgtttctgattgttgttacatgtatcgtctcgctttatagaatgatttttttcgtctgg

SEQ ID NO: 33811 - protein, 305 aa, Arabidopsis thaliana
  misc_feature (1)..(305): Ceres Seq. ID no. 13604163
ITTIAIMSMSRLGLLLFVAILLVLLQSSTCLISSPSSIINPSKVKQVSSKPRAFVYEGFLTDLECDHLISLAKENLQRSAVADNDNGESQVSDVRTSSGTFISKGKDPIVSGIEDKLSTWTFLPKENGEDLQVLRYEHGQKYDAHFDYFHDKVNIARGGHRIATVLLYLSNVTKGGETVFPDAQEFSRRSLSENKDDLSDCAKKGIAVKPKKGNALLFFNLQQDAIPDPFSLHGGCPVIEGEKWSATKWIHVDSFDKILTHDGNCTDVNESCERWAVLGECGKNPEYMVGTPEIPGNCRRSCKAC

SEQ ID NO: 33812 - protein, 299 aa, Arabidopsis thaliana
  misc_feature (1)..(299): Ceres Seq. ID no. 13604164
MSMSRLGLLLFVAILLVLLQSSTCLISSPSSIINPSKVKQVSSKPRAFVYEGFLTDLECDHLISLAKENLQRSAVADNDNGESQVSDVRTSSGTFISKGKDPIVSGIEDKLSTWTFLPKENGEDLQVLRYEHGQKYDAHFDYFHDKVNIARGGHRIATVLLYLSNVTKGGETVFPDAQEFSRRSLSENKDDLSDCAKKGIAVKPKKGNALLFFNLQQDAIPDPFSLHGGCPVIEGEKWSATKWIHVDSFDKILTHDGNCTDVNESCERWAVLGECGKNPEYMVGTPEIPGNCRRSCKAC

SEQ ID NO: 33813 - protein, 297 aa, Arabidopsis thaliana
  misc_feature (1)..(297): Ceres Seq. ID no. 13604165
MSRLGLLLFVAILLVLLQSSTCLISSPSSIINPSKVKQVSSKPRAFVYEGFLTDLECDHLISLAKENLQRSAVADNDNGESQVSDVRTSSGTFISKGKDPIVSGIEDKLSTWTFLPKENGEDLQVLRYEHGQKYDAHFDYFHDKVNIARGGHRIATVLLYLSNVTKGGETVFPDAQEFSRRSLSENKDDLSDCAKKGIAVKPKKGNALLFFNLQQDAIPDPFSLHGGCPVIEGEKWSATKWIHVDSFDKILTHDGNCTDVNESCERWAVLGECGKNPEYMVGTPEIPGNCRRSCKAC

SEQ ID NO: 33814 - DNA, 1434 bp, Arabidopsis thaliana
  misc_feature (1)..(1434): Ceres Seq. ID no. 13604209
attatatgaatatatatacgtacacaaaatcatacgtttttccacaaatggatcaagaagaggaagagatcgagattcctaattactttatctgcccaatctcactagagatcatgaaagatccagtcacgaccgtttctggcatcacttacgaccgtcaaaacatcgttaaatggctcgaaaaggtcccttcttgtcccgtcacgaagcaacctcttcccttagactccgatcttacacctaaccacatgcttcgccgtcttatccaacactggtgcgtcgagaacgagacacgtggcgttgtcagaatctctacacctcgagttcctcctggaaaacttaacgtcgtcgaagagatcaagaatctcaaaaagttcggccaagaagccttaggaagagaagaaacgttgcagaagcttgaagttttggcaatggacggaaataacagaagattgatgtgtgaatgtggcgtacataagtctttgatcttgttcgtagtcaagtgtactagtgaagacgaagacggacgacgtcgtatcaaaggactagatgagtctcttcgtcttcttcacttgatcggtattccatcaaacgacgcaaaaacaatcttgatggaaaacgatcgagttatggaatcgttgacttgggttttacaccaagaagactttctcagtaaggcttatacaattgtgctattgaggaatctaacggaatacacttcctctcatatcgtagagagattgaatcccgagatttttaaagggatcatagggtttctcaaggatgttgtaaatagtgttaatcggacgagccctaccgtgagagaaacggtacagtcatcatcaaggcctagcttgggaaaaacggaaccatcaaaacttgatcatagtttggtcatcaaacaagcggtgactgccgcgctgatgattcttttagagacttcttcgtggagccgaaaccgatcactccttgtggatctcggtgcggtttctgaactcatcgaactcgaaataagctacactggcgagaaaagaatcacagaacttatgttaggagttttatctcgtttatgttgctgtgcgaacggtagagccgagattcttgctcataggggcggaatcgcggttgtgacaaagcggctattgagggtttcacctgcggcagacgatagagctatctctatcctaactacagtgtcaaaattctcgccggaaaacatggtggtggaagagatggttaatgttgggacggtagagaagctctgttccgttctaggaatggattgtggtttgaacttgaaggagaaagcaaaagagatactaaaagatcattttgatgagtggaagaagtttccatgtattgacataactcttctcactaagctgctaagcatctcacccaaagggccaaagatctaagtaaataatctgctgc

SEQ ID NO: 33815 - protein, 471 aa, Arabidopsis thaliana
  misc_feature (1)..(471): Ceres Seq. ID no. 13604210
YMNIYTYTKSYVFPQMDQEEEEIEIPNYFICPISLEIMKDPVTTVSGITYDRQNIVKWLEKVPSCPVTKQPLPLDSDLTPNHMLRRLIQHWCVENETRGVVRISTPRVPPGKLNVVEEIKNLKKFGQEALGREETLQKLEVLAMDGNNRRLMCECGVHKSLILFVVKCTSEDEDGRRRIKGLDESLRLLHLIGIPSNDAKTILMENDRVMESLTWVLHQEDFLSKAYTIVLLRNLTEYTSSHIVERLNPEIFKGIIGFLKDVVNSVNRTSPTVRETVQSSSRPSLGKTEPSKLDHSLVIKQAVTAALMILLETSSWSRNRSLLVDLGAVSELIELEISYTGEKRITELMLGVLSRLCCCANGRAEILAHRGGIAVVTKRLLRVSPAADDRAISILTTVSKFSPENMVVEEMVNVGTVEKLCSVLGMDCGLNLKEKAKEILKDHFDEWKKFPCIDITLLTKLLSISPKGPKI

SEQ ID NO: 33816 - protein, 470 aa, Arabidopsis thaliana
  misc_feature (1)..(470): Ceres Seq. ID no. 13604211
MNIYTYTKSYVFPQMDQEEEEIEIPNYFICPISLEIMKDPVTTVSGITYDRQNIVKWLEKVPSCPVTKQPLPLDSDLTPNHMLRRLIQHWCVENETRGVVRISTPRVPPGKLNVVEEIKNLKKFGQEALGREETLQKLEVLAMDGNNRRLMCECGVHKSLILFVVKCTSEDEDGRRRIKGLDESLRLLHLIGIPSNDAKTILMENDRVMESLTWVLHQEDFLSKAYTIVLLRNLTEYTSSHIVERLNPEIFKGIIGFLKDVVNSVNRTSPTVRETVQSSSRPSLGKTEPSKLDHSLVIKQAVTAALMILLETSSWSRNRSLLVDLGAVSELIELEISYTGEKRITELMLGVLSRLCCCANGRAEILAHRGGIAVVTKRLLRVSPAADDRAISILTTVSKFSPENMVVEEMVNVGTVEKLCSVLGMDCGLNLKEKAKEILKDHFDEWKKFPCIDITLLTKLLSISPKGPKI

SEQ ID NO: 33817 - protein, 456 aa, Arabidopsis thaliana
  misc_feature (1)..(456): Ceres Seq. ID no. 13604212
MDQEEEEIEIPNYFICPISLEIMKDPVTTVSGITYDRQNIVKWLEKVPSCPVTKQPLPLDSDLTPNHMLRRLIQHWCVENETRGVVRISTPRVPPGKLNVVEEIKNLKKFGQEALGREETLQKLEVLAMDGNNRRLMCECGVHKSLILFVVKCTSEDEDGRRRIKGLDESLRLLHLIGIPSNDAKTILMENDRVMESLTWVLHQEDFLSKAYTIVLLRNLTEYTSSHIVERLNPEIFKGIIGFLKDVVNSVNRTSPTVRETVQSSSRPSLGKTEPSKLDHSLVIKQAVTAALMILLETSSWSRNRSLLVDLGAVSELIELEISYTGEKRITELMLGVLSRLCCCANGRAEILAHRGGIAVVTKRLLRVSPAADDRAISILTTVSKFSPENMVVEEMVNVGTVEKLCSVLGMDCGLNLKEKAKEILKDHFDEWKKFPCIDITLLTKLLSISPKGPKI

SEQ ID NO: 33818 - DNA, 3378 bp, Arabidopsis thaliana
  misc_feature (1)..(3378): Ceres Seq. ID no. 13604213
atgactatgatgactccgccgccgctagatcagcaggaagacgaggagatgcttgttccgaatccggatttggtcgagggacctcagcctatggaagttgcccaaactgatcctgctgctaccgctgtggagaatccaccacccgaggatcctccaagtctgaaattcacgtggaccatcccaatgttcactaggctcaataccaggaagcattactctgacgtatttgttgtaggcggttataagtggcgtatattgatttttcccaaaggaaacaatgtcgaccatttgtcaatgtacttggatgttgctgatgctgcgaatttgccgtacgggtggagcagatattcacagttcagtctggctgtagtgaatcaagtcaacaaccgatattccatcagaaaggagacgcaacatcaattcaatgcaagagaaagcgactgggggtttacatcattcatgcctctcagcgagctctatgaacccactcgaggatatttagtgaatgacactgttctgattgaagctgaagttgctgtgcgtaaagttcttgattattggtcatatgactcaaaaaaagagacaggttttgttggactaaaaaaccaaggtgctacctgttacatgaattctctcctgcagactttataccacataccttactttagaaaggctgtttaccacatgccaacgactgaaaatgatgcacctaccgctagtatcccattggcgctccagagtttattttacaagcttcagtataatgataccagtgtagcgacaaaggagctgacaaagtcgtttggttgggatacatatgattcttttatgcaacatgatgtacaagaactcaacagagttctctgtgaaaagcttgaggacaagatgaagggaactgttgtggagggaacaatacaaaagctatttgaaggtcaccacatgaattacattgagtgcattaatgtagattacaaatctacacggaaagagtcattttatgacctccagcttgatgttaaaggctgcaaagatgtatatgcttcttttgacaagtatgttgaagttgaacgccttgaaggagacaacaaataccatgcagaaggacatgatttgcaggatgcaaaaaaaggtgttctattcatagactttccaccagttcttcaacttcagctcaagaggtttgaatacgattttatgagggacacaatggtgaagattaatgatcggtatgagtttcctctccaactggatctcgacagagaagatggaagatatttatcccctgatgcagacaagagtgtccgcaatctctacaccctccacagtgtcttggttcacagtggaggagtgcatggagggcattattatgcttttattaggccaacactttcagatcagtggtataaatttgacgatgaacgggtcacgaaagaagatgtcaaaagagcactggaagagcaatatggtggtgaagaagagttaccgcagaataatcctggtttcaataatccacctttcaaattcacaaaatactcgaatgcatacatgcttgtttatattcgggaaagtgacaaggataagataatctgcaacgttgatgagaaagacattgcggaacatttgcgggtgaggctgaaaaaagaacaagaagaaaaggaagataaaagaaaatacaaggctcaagctcaccttttcacgacaatcaaggtcgcaagagatgatgacatcactgagcaaattggaaagaatatatattttgatcttgttgatcatgaaaaagtgaggagttttcgaatccagaaacagaccccctttcaacaatttaaggaagaggtagccaaagagtttggtgtcccggttcaactacagcggttctggatctgggcaaagcgtcaaaaccatacttaccgccccaatcgtcccctatcacctaatgaagaattacagacggttggacaaatacgagaggcatctaacaaggcaaacaatgctgagctaaagctgtttttggaaatagagcgtggaccggatgaccttcctattcctcccccagaaaaaacttctgaggatatccttcttttctttaaactctatgaccctgagaacgcagtactaagatatgttggcaggctaatggtgaaaagttccagtaagcccatggatatagtagggcaattgaataaaatggctggttttgctcctgatgaggaaatagaactttttgaggaaataaagtttgaaccttgcgtaatgtgtgaacagattgataagaagacttctttcaggctgtgtcaaattgaagatggagatatcatttgttatcagaaacctctttctatcgaggagagtgaatttcgatacccagatgtgccatcatttttggagtatgtacagaatcgagagctggtgcgttttcgcacactggaaaaaccaaaagaggatgagtttactatggagctgtcaaagctgcacacttatgatgatgtagtggaaagggtggctgagaagcttggccttgacgatccatcaaaacttaggcttacatctcacaattgctactctcagcaacccaagcctcagccaatcaaataccgtggagtagatcatctttcagatatgttagttcactataatcagacgtctgacatattgtattatgaagttttggatattcctcttccagaattgcaaggtcttaagactctaaaagtagctttccatagtgccacaaaggatgaagtgataatccacaatatcagactacctaagcagagtactgttggagatgttattaacgaactgaaaacaaaggtggagctttcgcatcaagatgcagaactgaggttacttgaggtctttttccacaagatctacaagatctttccatctactgaacgaattgaaaacatcaatgaccagtactggactttacgagcagaggagatacctgaagaagagaagaatattggtcccaatgataggttaattcacgtatatcattttactaaagaggccggacaaaatcagcaagttcaaaattttggggaacccttctttttggtaatccacgaaggtgaaactttagaagaaatcaagacccgtatccaaaagaaactccatgtccctgatgaggactttgccaagtggaagtttgcatcgttttcaatgggacgtcctgattacttgctggacacagatgttgtttataatcgctttcagagaagagatgtatacggtgcgtgggagcagtatcttgggttggagcacattgataatgctcctaaaagggcttatgctgcaaatcagaaccgacacgcatacgagaagccggtgaaaatatacaattaggagagagacatggctatgcatgtaggaatc

SEQ ID NO: 33819 - protein, 1115 aa, Arabidopsis thaliana
  misc_feature (1)..(1115): Ceres Seq. ID no. 13604214
MTMMTPPPLDQQEDEEMLVPNPDLVEGPQPMEVAQTDPAATAVENPPPEDPPSLKFTWTIPMFTRLNTRKHYSDVFVVGGYKWRILIFPKGNNVDHLSMYLDVADAANLPYGWSRYSQFSLAVVNQVNNRYSIRKETQHQFNARESDWGFTSFMPLSELYEPTRGYLVNDTVLIEAEVAVRKVLDYWSYDSKKETGFVGLKNQGATCYMNSLLQTLYHIPYFRKAVYHMPTTENDAPTASIPLALQSLFYKLQYNDTSVATKELTKSFGWDTYDSFMQHDVQELNRVLCEKLEDKMKGTVVEGTIQKLFEGHHMNYIECINVDYKSTRKESFYDLQLDVKGCKDVYASFDKYVEVERLEGDNKYHAEGHDLQDAKKGVLFIDFPPVLQLQLKRFEYDFMRDTMVKINDRYEFPLQLDLDREDGRYLSPDADKSVRNLYTLHSVLVHSGGVHGGHYYAFIRPTLSDQWYKFDDERVTKEDVKRALEEQYGGEEELPQNNPGFNNPPFKFTKYSNAYMLVYIRESDKDKIICNVDEKDIAEHLRVRLKKEQEEKEDKRKYKAQAHLFTTIKVARDDDITEQIGKNIYFDLVDHEKVRSFRIQKQTPFQQFKEEVAKEFGVPVQLQRFWIWAKRQNHTYRPNRPLSPNEELQTVGQIREASNKANNAELKLFLEIERGPDDLPIPPPEKTSEDILLFFKLYDPENAVLRYVGRLMVKSSSKPMDIVGQLNKMAGFAPDEEIELFEEIKFEPCVMCEQIDKKTSFRLCQIEDGDIICYQKPLSIEESEFRYPDVPSFLEYVQNRELVRFRTLEKPKEDEFTMELSKLHTYDDVVERVAEKLGLDDPSKLRLTSHNCYSQQPKPQPIKYRGVDHLSDMLVHYNQTSDILYYEVLDIPLPELQGLKTLKVAFHSATKDEVIIHNIRLPKQSTVGDVINELKTKVELSHQDAELRLLEVFFHKIYKIFPSTERIENINDQYWTLRAEEIPEEEKNIGPNDRLIHVYHFTKEAGQNQQVQNFGEPFFLVIHEGETLEEIKTRIQKKLHVPDEDFAKWKFASFSMGRPDYLLDTDVVYNRFQRRDVYGAWEQYLGLEHIDNAPKRAYAANQNRHAYEKPVKIYN

SEQ ID NO: 33820 - protein, 1113 aa, Arabidopsis thaliana
  misc_feature (1)..(1113): Ceres Seq. ID no. 13604215
MMTPPPLDQQEDEEMLVPNPDLVEGPQPMEVAQTDPAATAVENPPPEDPPSLKFTWTIPMFTRLNTRKHYSDVFVVGGYKWRILIFPKGNNVDHLSMYLDVADAANLPYGWSRYSQFSLAVVNQVNNRYSIRKETQHQFNARESDWGFTSFMPLSELYEPTRGYLVNDTVLIEAEVAVRKVLDYWSYDSKKETGFVGLKNQGATCYMNSLLQTLYHIPYFRKAVYHMPTTENDAPTASIPLALQSLFYKLQYNDTSVATKELTKSFGWDTYDSFMQHDVQELNRVLCEKLEDKMKGTVVEGTIQKLFEGHHMNYIECINVDYKSTRKESFYDLQLDVKGCKDVYASFDKYVEVERLEGDNKYHAEGHDLQDAKKGVLFIDFPPVLQLQLKRFEYDFMRDTMVKINDRYEFPLQLDLDREDGRYLSPDADKSVRNLYTLHSVLVHSGGVHGGHYYAFIRPTLSDQWYKFDDERVTKEDVKRALEEQYGGEEELPQNNPGFNNPPFKFTKYSNAYMLVYIRESDKDKIICNVDEKDIAEHLRVRLKKEQEEKEDKRKYKAQAHLFTTIKVARDDDITEQIGKNIYFDLVDHEKVRSFRIQKQTPFQQFKEEVAKEFGVPVQLQRFWIWAKRQNHTYRPNRPLSPNEELQTVGQIREASNKANNAELKLFLEIERGPDDLPIPPPEKTSEDILLFFKLYDPENAVLRYVGRLMVKSSSKPMDIVGQLNKMAGFAPDEEIELFEEIKFEPCVMCEQIDKKTSFRLCQIEDGDIICYQKPLSIEESEFRYPDVPSFLEYVQNRELVRFRTLEKPKEDEFTMELSKLHTYDDVVERVAEKLGLDDPSKLRLTSHNCYSQQPKPQPIKYRGVDHLSDMLVHYNQTSDILYYEVLDIPLPELQGLKTLKVAFHSATKDEVIIHNIRLPKQSTVGDVINELKTKVELSHQDAELRLLEVFFHKIYKIFPSTERIENINDQYWTLRAEEIPEEEKNIGPNDRLIHVYHFTKEAGQNQQVQNFGEPFFLVIHEGETLEEIKTRIQKKLHVPDEDFAKWKFASFSMGRPDYLLDTDVVYNRFQRRDVYGAWEQYLGLEHIDNAPKRAYAANQNRHAYEKPVKIYN

SEQ ID NO: 33821 - protein, 1112 aa, Arabidopsis thaliana
  misc_feature (1)..(1112): Ceres Seq. ID no. 13604216
MTPPPLDQQEDEEMLVPNPDLVEGPQPMEVAQTDPAATAVENPPPEDPPSLKFTWTIPMFTRLNTRKHYSDVFVVGGYKWRILIFPKGNNVDHLSMYLDVADAANLPYGWSRYSQFSLAVVNQVNNRYSIRKETQHQFNARESDWGFTSFMPLSELYEPTRGYLVNDTVLIEAEVAVRKVLDYWSYDSKKETGFVGLKNQGATCYMNSLLQTLYHIPYFRKAVYHMPTTENDAPTASIPLALQSLFYKLQYNDTSVATKELTKSFGWDTYDSFMQHDVQELNRVLCEKLEDKMKGTVVEGTIQKLFEGHHMNYIECINVDYKSTRKESFYDLQLDVKGCKDVYASFDKYVEVERLEGDNKYHAEGHDLQDAKKGVLFIDFPPVLQLQLKRFEYDFMRDTMVKINDRYEFPLQLDLDREDGRYLSPDADKSVRNLYTLHSVLVHSGGVHGGHYYAFIRPTLSDQWYKFDDERVTKEDVKRALEEQYGGEEELPQNNPGFNNPPFKFTKYSNAYMLVYIRESDKDKIICNVDEKDIAEHLRVRLKKEQEEKEDKRKYKAQAHLFTTIKVARDDDITEQIGKNIYFDLVDHEKVRSFRIQKQTPFQQFKEEVAKEFGVPVQLQRFWIWAKRQNHTYRPNRPLSPNEELQTVGQIREASNKANNAELKLFLEIERGPDDLPIPPPEKTSEDILLFFKLYDPENAVLRYVGRLMVKSSSKPMDIVGQLNKMAGFAPDEEIELFEEIKFEPCVMCEQIDKKTSFRLCQIEDGDIICYQKPLSIEESEFRYPDVPSFLEYVQNRELVRFRTLEKPKEDEFTMELSKLHTYDDVVERVAEKLGLDDPSKLRLTSHNCYSQQPKPQPIKYRGVDHLSDMLVHYNQTSDILYYEVLDIPLPELQGLKTLKVAFHSATKDEVIIHNIRLPKQSTVGDVINELKTKVELSHQDAELRLLEVFFHKIYKIFPSTERIENINDQYWTLRAEEIPEEEKNIGPNDRLIHVYHFTKEAGQNQQVQNFGEPFFLVIHEGETLEEIKTRIQKKLHVPDEDFAKWKFASFSMGRPDYLLDTDVVYNRFQRRDVYGAWEQYLGLEHIDNAPKRAYAANQNRHAYEKPVKIYN

SEQ ID NO: 33822 - DNA, 710 bp, Arabidopsis thaliana
  misc_feature (1)..(710): Ceres Seq. ID no. 13604225
gcaagtttgcgcaacaatggcgactacgattccactcttcgcctctttcaaatacgccgatagcttaacggtcgtaggaatctccttctgcaccgcgttggtctgcgaagccatctcatggatcttaatctaccgtaccagctcatacaaatccttgaaatactccattgacaaggccacgaagaaactcgagacaatgaagacagagaatccatcgtcaaagctatccataaagaaatcaaagacgaagaagatcgatcgcgttgaaaccagcttaaaggaatcgagccgagatctgtcactcttcaagttcaaatccggcgccgttgtggcactggttctcttcgtcgtcttcggattgctcaattcactattcgaaggtaaagtcgtcgcgaagcttcctttccatccgatcacgatagtgaagaagatgagtcacaggggactgaaaggtgatgatccgacggattgttccatggcttttctctatctgctgtgttcaattagtatcagaaccaatctacagaaatttctagggttttctccgccgcgaggagctgctggtgctggtggtttgttccccatgcctgatcctaagaccaactgatcactcctttgaggttttttttttttgtttttgttgagatttttggaacaattttcatataaacacacagttacaagtttttgcaatcatctgatgattttgg

SEQ ID NO: 33823 - protein, 201 aa, Arabidopsis thaliana
  misc_feature (1)..(201): Ceres Seq. ID no. 13604226
QVCATMATTIPLFASFKYADSLTVVGISFCTALVCEAISWILIYRTSSYKSLKYSIDKATKKLETMKTENPSSKLSIKKSKTKKIDRVETSLKESSRDLSLFKFKSGAVVALVLFVVFGLLNSLFEGKVVAKLPFHPITIVKKMSHRGLKGDDPTDCSMAFLYLLCSISIRTNLQKFLGFSPPRGAAGAGGLFPMPDPKTN

SEQ ID NO: 33824 - protein, 196 aa, Arabidopsis thaliana
  misc_feature (1)..(196): Ceres Seq. ID no. 13604227
MATTIPLFASFKYADSLTVVGISFCTALVCEAISWILIYRTSSYKSLKYSIDKATKKLETMKTENPSSKLSIKKSKTKKIDRVETSLKESSRDLSLFKFKSGAVVALVLFVVFGLLNSLFEGKVVAKLPFHPITIVKKMSHRGLKGDDPTDCSMAFLYLLCSISIRTNLQKFLGFSPPRGAAGAGGLFPMPDPKTN

SEQ ID NO: 33825 - protein, 136 aa, Arabidopsis thaliana
  misc_feature (1)..(136): Ceres Seq. ID no. 13604228
MKTENPSSKLSIKKSKTKKIDRVETSLKESSRDLSLFKFKSGAVVALVLFVVFGLLNSLFEGKVVAKLPFHPITIVKKMSHRGLKGDDPTDCSMAFLYLLCSISIRTNLQKFLGFSPPRGAAGAGGLFPMPDPKTN

SEQ ID NO: 33826 - DNA, 1561 bp, Arabidopsis thaliana
  misc_feature (1)..(1561): Ceres Seq. ID no. 13604245
attcgcttttctgaatcctttagagtattgttttctccgtcgaattcgcatgaacacttgagctcaacaagacggcgtggaagtggacggtgaggtagttttttttagtttttgaaagacatggcgcaaaacgggtacttggttccagcggatccttcggcggttgtgacggtgaagaagaaaacgccacaagcgtcgtgggctcttattgacgcgacgggacagagtgagccactcgatgttgataagtatgagatcatgcaccgtgtccagatccacgctcgcgatctccggattctagaccccaatttatcttacccttccactattcttggccgagagagagccattgttctcaatttggagcatatcaaggctattatcacttccgaagaggttttgcttcgggatccgtctgatgaaaatgttattccagttgtggaggagcttcgaagacgcttacctgttggaaatgcatcacacaatggtggtcaaggagacgggaaagagatcgcaggtgctcaaaacgacggtgatactggtgacgaagatgaatccccatttgaatttcgggcgctggaagtagctttggaagcaatctgtagcttcttagctgcaaggacagcagaattagaaacagctgcttatcctgctttggatgagcttacctcaaagattagtagccgtaatttggatagagttcggaaattgaagagtgccatgactcggttgacagctcgggttcaaaaggtaagagatgaactcgaacagttgctggatgatgacgatgatatggcagatctttacctttcaaggaaactttcaagtgcttcctcaccgattagtagtattggtgaaccaaattggtatactacttccccaacaataggctctaagatttcaagagcaagtagagcgagtttagccacagttcatggggatgagaatgatgttgaagaacttgaaatgttactcgaggcatacttcatgcagatcgacagcactttgaacagattaacaacactacgtgagtatattgatgacacagaggactacattaacatccagcttgacaatcatcggaatcagcttattcagttggagctagtgttaagttctggaacagtttgcttatcgatgtactctcttgtcgctggaattttcgggatgaacattccatacacatggaacgacggtcatggatacatgttcaaatacgtggtgggcttgacggggacactttgtgtagtcgtgtttgtgatcataatgtcgtacgctaggtacaaaggacttgtgggatcttgatggctgaatttgggttagatggagagattgtgaaggggcattgggcagatcttgttttcgattattatacttgtggtcgttctgagttttgaacgagcttcacaattattttagttgtcgcatcataaaatttaatcaaacatattgaaaaaagcagaagcattgtgacttgtaattgcaaagataagctctaccatcgattccttacaattagagcatagaaatcaaatttaggatccttgattccttattagct

SEQ ID NO: 33827 - protein, 394 aa, Arabidopsis thaliana
  misc_feature (1)..(394): Ceres Seq. ID no. 13604246
MAQNGYLVPADPSAVVTVKKKTPQASWALIDATGQSEPLDVDKYEIMHRVQIHARDLRILDPNLSYPSTILGRERAIVLNLEHIKAIITSEEVLLRDPSDENVIPVVEELRRRLPVGNASHNGGQGDGKEIAGAQNDGDTGDEDESPFEFRALEVALEAICSFLAARTAELETAAYPALDELTSKISSRNLDRVRKLKSAMTRLTARVQKVRDELEQLLDDDDDMADLYLSRKLSSASSPISSIGEPNWYTTSPTIGSKISRASRASLATVHGDENDVEELEMLLEAYFMQIDSTLNRLTTLREYIDDTEDYINIQLDNHRNQLIQLELVLSSGTVCLSMYSLVAGIFGMNIPYTWNDGHGYMFKYVVGLTGTLCVVVFVIIMSYARYKGLVGS

SEQ ID NO: 33828 - protein, 348 aa, Arabidopsis thaliana
  misc_feature (1)..(348): Ceres Seq. ID no. 13604247
MHRVQIHARDLRILDPNLSYPSTILGRERAIVLNLEHIKAIITSEEVLLRDPSDENVIPVVEELRRRLPVGNASHNGGQGDGKEIAGAQNDGDTGDEDESPFEFRALEVALEAICSFLAARTAELETAAYPALDELTSKISSRNLDRVRKLKSAMTRLTARVQKVRDELEQLLDDDDDMADLYLSRKLSSASSPISSIGEPNWYTTSPTIGSKISRASRASLATVHGDENDVEELEMLLEAYFMQIDSTLNRLTTLREYIDDTEDYINIQLDNHRNQLIQLELVLSSGTVCLSMYSLVAGIFGMNIPYTWNDGHGYMFKYVVGLTGTLCVVVFVIIMSYARYKGLVGS

SEQ ID NO: 33829 - DNA, 697 bp, Arabidopsis thaliana
  misc_feature (1)..(697): Ceres Seq. ID no. 13604275
gtattaaattttggtatactttttctttcgcttataaattgctctgtatcacccatcttcctcctaagatcatctttaacttattataaaaaaaaaaaacaggattcactgctagctacagaagctttgatcacatggaagatcgaaaagagaacaagaactcgccatggctatcagtaccacagtttggagattgggatcaaaaaggaggatcaattgattactcaatggatttctcaaagatcagagagatgaggaaactcaacaagagagatgcttctcgagccagtcttggcaacgaggaagaactcattaacccttttcatgatcagcctcctgttgatactgccaagcctaagaagctaactacggttcacagtgacaacaacaaccgcaatgagttctctcaccatcacccacactctccttctaggaggagaagaatcttcagctgcttcaactgttgcgttaaagcttaaaggtgtttacttttatttatgataataacaacaaggggtgatatttgaagacagaaatgagaaatggtagtgccaccttgttttccacatgtgtttcttcggctgcatcacaattaaaatttgtctgttgttgtttactgtgtatctaactatgtttgctaaatgtcaagtgtagtaatatatattttttgtaatttttgtttggtgtatttagacac

SEQ ID NO: 33830 - protein, 114 aa, Arabidopsis thaliana
  misc_feature (1)..(114): Ceres Seq. ID no. 13604276
MEDRKENKNSPWLSVPQFGDWDQKGGSIDYSMDFSKIREMRKLNKRDASRASLGNEEELINPFHDQPPVDTAKPKKLTTVHSDNNNRNEFSHHHPHSPSRRRRIFSCFNCCVKA

SEQ ID NO: 33831 - protein, 84 aa, Arabidopsis thaliana
  misc_feature (1)..(84): Ceres Seq. ID no. 13604277
VLNFGILFLSLINCSVSPIFLLRSSLTYYKKKKQDSLLATEALITWKIEKRTRTRHGYQYHSLEIGIKKEDQLITQWISQRSER

SEQ ID NO: 33832 - protein, 83 aa, Arabidopsis thaliana
  misc_feature (1)..(83): Ceres Seq. ID no. 13604278
MDFSKIREMRKLNKRDASRASLGNEEELINPFHDQPPVDTAKPKKLTTVHSDNNNRNEFSHHHPHSPSRRRRIFSCFNCCVKA

SEQ ID NO: 33833 - DNA, 1317 bp, Arabidopsis thaliana
  misc_feature (1)..(1317): Ceres Seq. ID no. 13604298
aaaataataagctttggtaaaaccctaaactttcgtttccaagatgcaatttctagcttctctcgtttccaattccagaaagtttggtcggagatgggatcgagctctctcgttgcatcatttctcttcgaatgcgacaccagcttcgatatcaaatccagcgttcgtcgagtttctcagggacaatgggttccagaaacctctagcaattgccatcgcaatgcgttaccctaacctcaaatccctagaacaacctcggtcagtgattcaaatgcttaaaagttacagtttttccgatacccagatccagaaatcgatccgggtccatcctcgaatgatgttctacaacgtggagaaaattctagaacccaaacttcgattctttaaagatattggatttactggctctggtcttggtaagttcgtctctcaaaactcatcagtcgttggtgtaagtctagtgaagaaattgattcctaccgttgagattctgaaatcgattgttgccccaaaacatgaagaccttcctgtcattcttagtagatgtggttggcttcttctcagtagagaccctaacttgtttctcttaccaaacatctcataccttgaaacctgtggaattgttgggtctcagcttgcttctttacttagaagacagccaagaatcttcaatctctctgaggaaaaactcagaggatatgtctctcgtgctttggatcttggttttactttgaactcgaggatgcttgtgcacgctgttatctcgttaagttctttgagcgagaaaacgtttgatcgaaaggttaagttgtttatggctaatggattctctgaagatgagataacagatattatacgaagatctccaggtttgatccggtgctcagaagataagcttacactggggtttgagttttacttgaagagaatggggttagagagggaagctttggcgaaacgtccttgtgtgttgtcgtataatcttgagaagagggtgattcctaggcttaaagttttgcagatcttgagggaaaaagggttgttgttaaaagaggagaagaagaagaagaacatggttggcattgttgagatgactgaggaagcttttctagagaaatatgttgtgagatttggagatgagattgctgaggaactgctggttgcttacaagtgcgtgtgtttagtcgatgaaacgctacttgatcgtatcaagatctaattgtagatttcacaagtccaaacttgaaattttgtcattgtatccaaacttcgctcatccgtaactgtgttgaacattataatttggaagtaactctt

SEQ ID NO: 33834 - protein, 391 aa, Arabidopsis thaliana
  misc_feature (1)..(391): Ceres Seq. ID no. 13604299
MQFLASLVSNSRKFGRRWDRALSLHHFSSNATPASISNPAFVEFLRDNGFQKPLAIAIAMRYPNLKSLEQPRSVIQMLKSYSFSDTQIQKSIRVHPRMMFYNVEKILEPKLRFFKDIGFTGSGLGKFVSQNSSVVGVSLVKKLIPTVEILKSIVAPKHEDLPVILSRCGWLLLSRDPNLFLLPNISYLETCGIVGSQLASLLRRQPRIFNLSEEKLRGYVSRALDLGFTLNSRMLVHAVISLSSLSEKTFDRKVKLFMANGFSEDEITDIIRRSPGLIRCSEDKLTLGFEFYLKRMGLEREALAKRPCVLSYNLEKRVIPRLKVLQILREKGLLLKEEKKKKNMVGIVEMTEEAFLEKYVVRFGDEIAEELLVAYKCVCLVDETLLDRIKI

SEQ ID NO: 33835 - protein, 332 aa, Arabidopsis thaliana
  misc_feature (1)..(332): Ceres Seq. ID no. 13604300
MRYPNLKSLEQPRSVIQMLKSYSFSDTQIQKSIRVHPRMMFYNVEKILEPKLRFFKDIGFTGSGLGKFVSQNSSVVGVSLVKKLIPTVEILKSIVAPKHEDLPVILSRCGWLLLSRDPNLFLLPNISYLETCGIVGSQLASLLRRQPRIFNLSEEKLRGYVSRALDLGFTLNSRMLVHAVISLSSLSEKTFDRKVKLFMANGFSEDEITDIIRRSPGLIRCSEDKLTLGFEFYLKRMGLEREALAKRPCVLSYNLEKRVIPRLKVLQILREKGLLLKEEKKKKNMVGIVEMTEEAFLEKYVVRFGDEIAEELLVAYKCVCLVDETLLDRIKI

SEQ ID NO: 33836 - protein, 315 aa, Arabidopsis thaliana
  misc_feature (1)..(315): Ceres Seq. ID no. 13604301
MLKSYSFSDTQIQKSIRVHPRMMFYNVEKILEPKLRFFKDIGFTGSGLGKFVSQNSSVVGVSLVKKLIPTVEILKSIVAPKHEDLPVILSRCGWLLLSRDPNLFLLPNISYLETCGIVGSQLASLLRRQPRIFNLSEEKLRGYVSRALDLGFTLNSRMLVHAVISLSSLSEKTFDRKVKLFMANGFSEDEITDIIRRSPGLIRCSEDKLTLGFEFYLKRMGLEREALAKRPCVLSYNLEKRVIPRLKVLQILREKGLLLKEEKKKKNMVGIVEMTEEAFLEKYVVRFGDEIAEELLVAYKCVCLVDETLLDRIKI

SEQ ID NO: 33837 - DNA, 970 bp, Arabidopsis thaliana
  misc_feature (1)..(970): Ceres Seq. ID no. 13604302
attcaaaattatataaaatgggaagcagcagcgacgagacgccagtggttctcatcacaggatgttctcagggaggaatcggtcacgcgttggcgcgtgagttctcggctaatggttgtcgtgtggtggcgacgagtcgatcgcagaagacgatgactgaattggagaaagattccaagttctttgtgcaagagctcgatgttcagtctgagcagagcgtgagtaaagttgtgtcgaaagttatcgacaaatttggtcagattgatgttttggttaataacgccggagttcagtgtatcggacctttggcggagattccaatttcagccatggattacaccttcaacaccaatgtgctcggttccatgaggatgactcaagctgttgtacctcacatggcgtctaagaaaaagggaaagattgtgaacataggaagtattagcataatggcaccaggaccatgggctggggtttatactgcatcaaaagctgctcttcatgctcttaccgacactttaaggttggagcttaagccatttgggattgatgtaatcaacattgtaccaggaggtattcaatcaaacatagctaactcagggatatcgagtttcaacaatttacctgaattgaaactatacaaaccgttcgaggacgctatccgtgagagagcgtttctgtcgcaaaacataaagccgatacccacagagacttttgcgaaagagactgtttccgtggtgctgaagaaaaacccaccggcttggtactctacaggtaggttatctacagtcatggcgatcatgcaccatataccgattttcatgaaagattttctgttgactaagagttttatgaaaaagggagtaaaacctgaatagttgtgttcttggttagaaactgttttaaatgtatccaacaaagtaaatgtgttgcctaaccatgttacatctttagtaaaaggattaatcaaggt

SEQ ID NO: 33838 - protein, 290 aa, Arabidopsis thaliana
  misc_feature (1)..(290): Ceres Seq. ID no. 13604303
SKLYKMGSSSDETPVVLITGCSQGGIGHALAREFSANGCRVVATSRSQKTMTELEKDSKFFVQELDVQSEQSVSKVVSKVIDKFGQIDVLVNNAGVQCIGPLAEIPISAMDYTFNTNVLGSMRMTQAVVPHMASKKKGKIVNIGSISIMAPGPWAGVYTASKAALHALTDTLRLELKPFGIDVINIVPGGIQSNIANSGISSFNNLPELKLYKPFEDAIRERAFLSQNIKPIPTETFAKETVSVVLKKNPPAWYSTGRLSTVMAIMHHIPIFMKDFLLTKSFMKKGVKPE

SEQ ID NO: 33839 - protein, 285 aa, Arabidopsis thaliana
  misc_feature (1)..(285): Ceres Seq. ID no. 13604304
MGSSSDETPVVLITGCSQGGIGHALAREFSANGCRVVATSRSQKTMTELEKDSKFFVQELDVQSEQSVSKVVSKVIDKFGQIDVLVNNAGVQCIGPLAEIPISAMDYTFNTNVLGSMRMTQAVVPHMASKKKGKIVNIGSISIMAPGPWAGVYTASKAALHALTDTLRLELKPFGIDVINIVPGGIQSNIANSGISSFNNLPELKLYKPFEDAIRERAFLSQNIKPIPTETFAKETVSVVLKKNPPAWYSTGRLSTVMAIMHHIPIFMKDFLLTKSFMKKGVKPE

SEQ ID NO: 33840 - protein, 240 aa, Arabidopsis thaliana
  misc_feature (1)..(240): Ceres Seq. ID no. 13604305
MTELEKDSKFFVQELDVQSEQSVSKVVSKVIDKFGQIDVLVNNAGVQCIGPLAEIPISAMDYTFNTNVLGSMRMTQAVVPHMASKKKGKIVNIGSISIMAPGPWAGVYTASKAALHALTDTLRLELKPFGIDVINIVPGGIQSNIANSGISSFNNLPELKLYKPFEDAIRERAFLSQNIKPIPTETFAKETVSVVLKKNPPAWYSTGRLSTVMAIMHHIPIFMKDFLLTKSFMKKGVKPE

SEQ ID NO: 33841 - DNA, 1289 bp, Arabidopsis thaliana
  misc_feature (1)..(1289): Ceres Seq. ID no. 13604316
atcttaccctaaaaaccacatttcttaacttcctcaataaaaaaaagaaaagcttcaccctttaattttaccctcaaccccaaaacaaaaaccccttcctccacgagggcatacagaaatatcaaagacccaatctttctttcacttccccaatctctagatgacaatctaacgatacagttccttttagatcgattaccaaatacaaaggatcaatttttcttacatgaacactctgttgtaatggcagaggagaatctagaactgagtcttttatgtacagagagcaacgttgatgatgagggcatgattgttgacgaaactccgattgaaatttcgattcctcagatgggtttttctcaatcggagagtgaggagattatcatggagatggtggagaaggagaagcagcatttgccaagtgatgattacatcaagagacttagaagtggagatttggatttgaatgttggaagaagagatgccctcaattggatttggaaggcttgtgaagtacaccagtttggaccattgtgtttttgcttagcaatgaactacttggatcgattcttatcggttcatgatttgcctagtggcaaaggttggatattgcagttgttggctgtggcttgtttatcattggcagccaaaattgaagaaactgaagttccaatgttgatagatcttcaggttggagatcctcagtttgtgtttgaggctaaatcagtccaaagaatggagcttttggtgttgaacaaattgaaatggagattgagagcaataactccatgctcatacataagatatttcctgagaaagatgagtaaatgtgatcaagaaccatccaacacattgatatctagatcattacaagtgatagccagcacaaccaaaggtattgactttttggagtttagaccttctgaagttgctgctgctgtggcactttctgtttctggagaattgcagagagtacactttgacaactcttccttctctcctcttttctcactacttcaaaaggagagagtgaagaagataggggaaatgatagagagtgatggctcagacttatgttcacaaacacccaatggggttttagaagtatcggcttgttgtttcagctttaagacccatgattcttcttcttcttatacacatctttcttaaaaaaaaaactgtttttttcttacattattataatcagtatgatgtctgatgagaggttgaaaaaagaggacaataaatcaaagcaaaaatttttaaataaataaaagtgtattaatttc

SEQ ID NO: 33842 - protein, 308 aa, Arabidopsis thaliana
  misc_feature (1)..(308): Ceres Seq. ID no. 13604317
MAEENLELSLLCTESNVDDEGMIVDETPIEISIPQMGFSQSESEEIIMEMVEKEKQHLPSDDYIKRLRSGDLDLNVGRRDALNWIWKACEVHQFGPLCFCLAMNYLDRFLSVHDLPSGKGWILQLLAVACLSLAAKIEETEVPMLIDLQVGDPQFVFEAKSVQRMELLVLNKLKWRLRAITPCSYIRYFLRKMSKCDQEPSNTLISRSLQVIASTTKGIDFLEFRPSEVAAAVALSVSGELQRVHFDNSSFSPLFSLLQKERVKKIGEMIESDGSDLCSQTPNGVLEVSACCFSFKTHDSSSSYTHLS

SEQ ID NO: 33843 - protein, 287 aa, Arabidopsis thaliana
  misc_feature (1)..(287): Ceres Seq. ID no. 13604318
MIVDETPIEISIPQMGFSQSESEEIIMEMVEKEKQHLPSDDYIKRLRSGDLDLNVGRRDALNWIWKACEVHQFGPLCFCLAMNYLDRFLSVHDLPSGKGWILQLLAVACLSLAAKIEETEVPMLIDLQVGDPQFVFEAKSVQRMELLVLNKLKWRLRAITPCSYIRYFLRKMSKCDQEPSNTLISRSLQVIASTTKGIDFLEFRPSEVAAAVALSVSGELQRVHFDNSSFSPLFSLLQKERVKKIGEMIESDGSDLCSQTPNGVLEVSACCFSFKTHDSSSSYTHLS

SEQ ID NO: 33844 - protein, 273 aa, Arabidopsis thaliana
  misc_feature (1)..(273): Ceres Seq. ID no. 13604319
MGFSQSESEEIIMEMVEKEKQHLPSDDYIKRLRSGDLDLNVGRRDALNWIWKACEVHQFGPLCFCLAMNYLDRFLSVHDLPSGKGWILQLLAVACLSLAAKIEETEVPMLIDLQVGDPQFVFEAKSVQRMELLVLNKLKWRLRAITPCSYIRYFLRKMSKCDQEPSNTLISRSLQVIASTTKGIDFLEFRPSEVAAAVALSVSGELQRVHFDNSSFSPLFSLLQKERVKKIGEMIESDGSDLCSQTPNGVLEVSACCFSFKTHDSSSSYTHLS

SEQ ID NO: 33845 - DNA, 1031 bp, Arabidopsis thaliana
  misc_feature (1)..(1031): Ceres Seq. ID no. 13604320
ctcaatttctttttttcttccagaaatttcctccgatttcaaaattttccggtgaaatcgaaaaaaaaagcgagatcttcttctctaatggcgacgaccttaagcagagatcaatatgtctacatggcgaagctcgccgagcaagccgagcgttacgaagagatggttcaattcatggaacagctcgtaagtggagctacaccggccggtgagctgaccgtagaagagaggaatcttctctcggtcgcgtataagaacgtgattggatctcttcgtgcggcatggagaatcgtgtcttcgattgagcaaaaggaagagagcaggaagaacgaagaacacgtgtcgcttgttaaggattacagatctaaagttgagactgagctttcttcgatctgttctgggattctcaggttacttgattcgcatctaattccttcagctactgccagtgagtctaaggttttttacctgaagatgaaaggagattatcatcgttatttggctgagtttaaatctggtgatgagaggaaaactgctgctgaagatactatgatcgcttacaaagctgctcaggacgttgcagttgctgatctagcacctacacatccgatcaggcttggtttggctcttaacttctcagtgttttactacgagattctcaactcttcagagaaagcttgtagcatggcgaaacaggcttttgaagaagccattgctgagctggacacattgggagaggagtcatacaaggacagtactctcatcatgcagttgctaagggacaatctaaccctttggacctccgatatgcaggagcagatggatgaggcctgaaggtctaatggaagaaaagacggttatgtaatgtacctgcaaccgtaaccgaaaatctgagttcaacctcctttgctgtaaaacttgtcgaaaagaaaagtttgtttttttatgacagattatgtgcacagctttggtgttatctgctgctctgtatcaactctgtttttgtttggtaatttatcctcatctttgct

SEQ ID NO: 33846 - protein, 277 aa, Arabidopsis thaliana
  misc_feature (1)..(277): Ceres Seq. ID no. 13604321
LNFFFSSRNFLRFQNFPVKSKKKARSSSLMATTLSRDQYVYMAKLAEQAERYEEMVQFMEQLVSGATPAGELTVEERNLLSVAYKNVIGSLRAAWRIVSSIEQKEESRKNEEHVSLVKDYRSKVETELSSICSGILRLLDSHLIPSATASESKVFYLKMKGDYHRYLAEFKSGDERKTAAEDTMIAYKAAQDVAVADLAPTHPIRLGLALNFSVFYYEILNSSEKACSMAKQAFEEAIAELDTLGEESYKDSTLIMQLLRDNLTLWTSDMQEQMDEA

SEQ ID NO: 33847 - protein, 248 aa, Arabidopsis thaliana
  misc_feature (1)..(248): Ceres Seq. ID no. 13604322
MATTLSRDQYVYMAKLAEQAERYEEMVQFMEQLVSGATPAGELTVEERNLLSVAYKNVIGSLRAAWRIVSSIEQKEESRKNEEHVSLVKDYRSKVETELSSICSGILRLLDSHLIPSATASESKVFYLKMKGDYHRYLAEFKSGDERKTAAEDTMIAYKAAQDVAVADLAPTHPIRLGLALNFSVFYYEILNSSEKACSMAKQAFEEAIAELDTLGEESYKDSTLIMQLLRDNLTLWTSDMQEQMDEA

SEQ ID NO: 33848 - protein, 236 aa, Arabidopsis thaliana
  misc_feature (1)..(236): Ceres Seq. ID no. 13604323
MAKLAEQAERYEEMVQFMEQLVSGATPAGELTVEERNLLSVAYKNVIGSLRAAWRIVSSIEQKEESRKNEEHVSLVKDYRSKVETELSSICSGILRLLDSHLIPSATASESKVFYLKMKGDYHRYLAEFKSGDERKTAAEDTMIAYKAAQDVAVADLAPTHPIRLGLALNFSVFYYEILNSSEKACSMAKQAFEEAIAELDTLGEESYKDSTLIMQLLRDNLTLWTSDMQEQMDEA

SEQ ID NO: 33849 - DNA, 2247 bp, Arabidopsis thaliana
  misc_feature (1)..(2247): Ceres Seq. ID no. 13604331
atggctccggctgttttcgctaccttaaacgaaccgtcgtaccaggaacaatgcggcgccgtttttatgaggaaatttacaaaccaatccgtcaccgaaaacaccaataaccttccgctcttcaaccctaaccctaaccctaatttcgaaaggagcaattcgagcaagcagtgcgatgactcgtcggaatttggaagctatgctacttttaatctcgctgggtacacctcaagtcagctcagggagcttaagaagcgctttacctcagagctcaagcagattcggatcctgagagaacggatcgagtcagggacgttcgagactcagcaaggttatactatcccagaggtacccgccgttcgatcagctccgttgaataacttcaccggtgaaaagaatgaccttggaccgaagaagaagaaacagaagaaaaatgtgtcaggtctcaagcgaagcaatcaatttggtccgtcggatccggagtcggagaaattattggccggtatgttgaatacctgtagtcagatcttggtgaagctaatgaagcataaatgggcgtgggtgttcaacactcctgttgatgtggttggtttagggcttcatgattatcatcaggttgtgaagaaacctatggatctgggtacagtgaaattgaatcttgataaaggattctacgtttcgccgattgattttgctactgatgtcagattgacattcgacaatgcaatgacgtataatccaaagggacaagatgtgtattttatggctgataagcttttggatcatttcgatggaatgttcaatcctgcttttaagaagtttgaggctcagcagcttaaactcactggttcttcatctcgtcctgaacctgacttcaaacctgacttcaagcaaagacagtggaatcagaatccgccaatggtggcgaatcctaggaaaggaaccgaacaaatatctattgcgaagaagcttgattcagtgaagccgccacaacctacattgcctcctcaattagtcgagccgtcacgcgttcaatctccttctcctcctccccctcctccggtgatacagcctgaacttccgcagcctcaaccaccacctccacagcttgaaattgaagtagaagcacctcctgatgtgagtgaagtgtcaaaaggaaggaaggggaagttgccgaagcctaaggctaaggatccaaataagaggttgatgacgatggaagagaagtcaaagcttggtatgaatctacaagacttgcctcctgagaagcttggtcagttgcttcagattctcaggaagagaaacggacatttagctcaagatggggacgaaattgagctggatatagaagctgtcgacaatgagactctatgggagcttgatcgttttgtgacgaactacaagaagatggctagcaaaatcaagcgccaagggtttatcaggaacgtgtcaactccacctaggaacatggcttcggtagcagaaatgggtagtgcggagaagagaacaaggagaggagatgcaggggaagaggatgttgacattggagaggacataccaatcgaagattatccatctgtagagatcgaaagagatggtactgcagttgcagctgctgctagtagtggttctagttcttcaggcagttccagttctagtggtggtagttcctcgtctagtgattcagggtcaggtgggagttcatcaggtagtgattctgatgcagatagtgttcaatcgccatttgtggaagcaaaagaagcccaatgttaaaatcatttgggaatttaaccgttgattctgtcctgaagtactaggaacgtttagctgagggtgtaaagggaggaatgaaggggaaaactgaaggaaaggatttgttttttctttcgatgataaacttaggaagcagatgtagttagaaagaaaaatgtaataggtagatagaaagagagtgctagtttaagcaagaagaagagttcgttatttaataccttttagatttaggagttgtttagtgtatttgtgagatgctgaacagagggtgagagtgagtgggtaggtactgtaggagaagaagaagaagaaaagagtctttttaggttctatgactttatttatttttctttgttagtagtgttaaagagtctggttgtggtaggaaaaatggtgatagaagagaagaaagaaatcaatgcaatgtattagatgtaaatggttggcatattaaaaaagaaaagttgattttcc

SEQ ID NO: 33850 - protein, 590 aa, Arabidopsis thaliana
  misc_feature (1)..(590): Ceres Seq. ID no. 13604332
MAPAVFATLNEPSYQEQCGAVFMRKFTNQSVTENTNNLPLFNPNPNPNFERSNSSKQCDDSSEFGSYATFNLAGYTSSQLRELKKRFTSELKQIRILRERIESGTFETQQGYTIPEVPAVRSAPLNNFTGEKNDLGPKKKKQKKNVSGLKRSNQFGPSDPESEKLLAGMLNTCSQILVKLMKHKWAWVFNTPVDVVGLGLHDYHQVVKKPMDLGTVKLNLDKGFYVSPIDFATDVRLTFDNAMTYNPKGQDVYFMADKLLDHFDGMFNPAFKKFEAQQLKLTGSSSRPEPDFKPDFKQRQWNQNPPMVANPRKGTEQISIAKKLDSVKPPQPTLPPQLVEPSRVQSPSPPPPPPVIQPELPQPQPPPPQLEIEVEAPPDVSEVSKGRKGKLPKPKAKDPNKRLMTMEEKSKLGMNLQDLPPEKLGQLLQILRKRNGHLAQDGDEIELDIEAVDNETLWELDRFVTNYKKMASKIKRQGFIRNVSTPPRNMASVAEMGSAEKRTRRGDAGEEDVDIGEDIPIEDYPSVEIERDGTAVAAAASSGSSSSGSSSSSGGSSSSSDSGSGGSSSGSDSDADSVQSPFVEAKEAQC

SEQ ID NO: 33851 - protein, 568 aa, Arabidopsis thaliana
  misc_feature (1)..(568): Ceres Seq. ID no. 13604333
MRKFTNQSVTENTNNLPLFNPNPNPNFERSNSSKQCDDSSEFGSYATFNLAGYTSSQLRELKKRFTSELKQIRILRERIESGTFETQQGYTIPEVPAVRSAPLNNFTGEKNDLGPKKKKQKKNVSGLKRSNQFGPSDPESEKLLAGMLNTCSQILVKLMKHKWAWVFNTPVDVVGLGLHDYHQVVKKPMDLGTVKLNLDKGFYVSPIDFATDVRLTFDNAMTYNPKGQDVYFMADKLLDHFDGMFNPAFKKFEAQQLKLTGSSSRPEPDFKPDFKQRQWNQNPPMVANPRKGTEQISIAKKLDSVKPPQPTLPPQLVEPSRVQSPSPPPPPPVIQPELPQPQPPPPQLEIEVEAPPDVSEVSKGRKGKLPKPKAKDPNKRLMTMEEKSKLGMNLQDLPPEKLGQLLQILRKRNGHLAQDGDEIELDIEAVDNETLWELDRFVTNYKKMASKIKRQGFIRNVSTPPRNMASVAEMGSAEKRTRRGDAGEEDVDIGEDIPIEDYPSVEIERDGTAVAAAASSGSSSSGSSSSSGGSSSSSDSGSGGSSSGSDSDADSVQSPFVEAKEAQC

SEQ ID NO: 33852 - protein, 422 aa, Arabidopsis thaliana
  misc_feature (1)..(422): Ceres Seq. ID no. 13604334
MLNTCSQILVKLMKHKWAWVFNTPVDVVGLGLHDYHQVVKKPMDLGTVKLNLDKGFYVSPIDFATDVRLTFDNAMTYNPKGQDVYFMADKLLDHFDGMFNPAFKKFEAQQLKLTGSSSRPEPDFKPDFKQRQWNQNPPMVANPRKGTEQISIAKKLDSVKPPQPTLPPQLVEPSRVQSPSPPPPPPVIQPELPQPQPPPPQLEIEVEAPPDVSEVSKGRKGKLPKPKAKDPNKRLMTMEEKSKLGMNLQDLPPEKLGQLLQILRKRNGHLAQDGDEIELDIEAVDNETLWELDRFVTNYKKMASKIKRQGFIRNVSTPPRNMASVAEMGSAEKRTRRGDAGEEDVDIGEDIPIEDYPSVEIERDGTAVAAAASSGSSSSGSSSSSGGSSSSSDSGSGGSSSGSDSDADSVQSPFVEAKEAQC

SEQ ID NO: 33853 - DNA, 1293 bp, Arabidopsis thaliana
  misc_feature (1)..(1293): Ceres Seq. ID no. 13604335
tcacacacacacacacacactctgttttcttcgtccattctattaccagaaaacagagtttgatagagagaaaagaatggaactgtcgactcaaatgaatgtgttcgaagagcttcttgttccgacaaagcaagaaacaaccgacaacaacatcaacaatctgagctttaatggcggatttgatcatcatcatcatcaattcttcccaaatggatataatattgattacctctgtttcaacaatgaagaagaagacgaaaatacccttttgtatccttcttctttcatggatctaatctctcaacctcctccattgcttcttcaccaaccgccaccgttacaaccactgtcgccgccgttatcctcctccgcgaccgccggagcaacatttgactacccttttcttgaggctttgcaagagataattgactcttcttcctcatcgcctccattgatccttcaaaatggtcaagaagagaactttaataatccgatgtcgtatccctctccattgatggagtctgatcagagcaagagcttcagtgttggttactgtggaggagagacgaacaagaagaagagcaaaaagcttgaaggccaaccttctaagaatctcatggcggagagacgacggagaaaacgacttaacgatcgtctttctatgctccgatccatcgtcccaaaaatcagtaagatggacaggacatcgatattaggagatgccatagattacatgaaagagcttttagacaaaatcaacaaattacaagatgaggaacaagaacttggaaatagcaacaattcacatcactctaagctcttcggtgatctcaaggatcttaatgcgaacgaacctctggtcagaaactcaccaaagtttgaaatagatcgtagagacgaggatactcgagttgatatatgctgctcgccaaaaccgggattgctactatctactgtgaatacattagagactctaggcttggagattgaacaatgtgttataagctgctttagtgatttctctttgcaggcttcttgttctgagggagctgagcagagagatttcataacatcagaagatataaaacaagcattattcagaaacgcaggttatggtggaagctgcttgtaatgagtcatgattgaaactaataaaccaaaactattgtttatttctaataatactagcgcttataaactttagatgttgttttaattcccttgtgagtttggtttttttttcctaggggaaaacattatgagttcagttgtataaacaaaagaaggaaattt

SEQ ID NO: 33854 - protein, 376 aa, Arabidopsis thaliana
  misc_feature (1)..(376): Ceres Seq. ID no. 13604336
HTHTHTLCFLRPFYYQKTEFDREKRMELSTQMNVFEELLVPTKQETTDNNINNLSFNGGFDHHHHQFFPNGYNIDYLCFNNEEEDENTLLYPSSFMDLISQPPPLLLHQPPPLQPLSPPLSSSATAGATFDYPFLEALQEIIDSSSSSPPLILQNGQEENFNNPMSYPSPLMESDQSKSFSVGYCGGETNKKKSKKLEGQPSKNLMAERRRRKRLNDRLSMLRSIVPKISKMDRTSILGDAIDYMKELLDKINKLQDEEQELGNSNNSHHSKLFGDLKDLNANEPLVRNSPKFEIDRRDEDTRVDICCSPKPGLLLSTVNTLETLGLEIEQCVISCFSDFSLQASCSEGAEQRDFITSEDIKQALFRNAGYGGSCL

SEQ ID NO: 33855 - protein, 351 aa, Arabidopsis thaliana
  misc_feature (1)..(351): Ceres Seq. ID no. 13604337
MELSTQMNVFEELLVPTKQETTDNNINNLSFNGGFDHHHHQFFPNGYNIDYLCFNNEEEDENTLLYPSSFMDLISQPPPLLLHQPPPLQPLSPPLSSSATAGATFDYPFLEALQEIIDSSSSSPPLILQNGQEENFNNPMSYPSPLMESDQSKSFSVGYCGGETNKKKSKKLEGQPSKNLMAERRRRKRLNDRLSMLRSIVPKISKMDRTSILGDAIDYMKELLDKINKLQDEEQELGNSNNSHHSKLFGDLKDLNANEPLVRNSPKFEIDRRDEDTRVDICCSPKPGLLLSTVNTLETLGLEIEQCVISCFSDFSLQASCSEGAEQRDFITSEDIKQALFRNAGYGGSCL

SEQ ID NO: 33856 - protein, 345 aa, Arabidopsis thaliana
  misc_feature (1)..(345): Ceres Seq. ID no. 13604338
MNVFEELLVPTKQETTDNNINNLSFNGGFDHHHHQFFPNGYNIDYLCFNNEEEDENTLLYPSSFMDLISQPPPLLLHQPPPLQPLSPPLSSSATAGATFDYPFLEALQEIIDSSSSSPPLILQNGQEENFNNPMSYPSPLMESDQSKSFSVGYCGGETNKKKSKKLEGQPSKNLMAERRRRKRLNDRLSMLRSIVPKISKMDRTSILGDAIDYMKELLDKINKLQDEEQELGNSNNSHHSKLFGDLKDLNANEPLVRNSPKFEIDRRDEDTRVDICCSPKPGLLLSTVNTLETLGLEIEQCVISCFSDFSLQASCSEGAEQRDFITSEDIKQALFRNAGYGGSCL

SEQ ID NO: 33857 - DNA, 1206 bp, Arabidopsis thaliana
  misc_feature (1)..(1206): Ceres Seq. ID no. 13604347
acaagcaaaaaaaattcactttttgtttttgttaacactcacgtgaaagcttcgttcttcttcaaaccttttgaacaatttctccgatgccggtaaatcaccggtttacgtttagctaccggttactcttcctcatcttccttttgagtttcgaaacggcacagcgtttggtcaccggtgacccaaacgacgaagcatgcttgacgaatctccgtcagagtttagaagatccagctaataatctccgtaactggacaaaatccttcttcataaatccttgctccggcttctcttcttatcttcatggagtcatttgcaacaatggcagaatttacaaactctccttaacaaatctctctctccgtggctcaatctctccgtttctctctaattgcacaaatctccaatccctagatctatcttccaaccagatctccggcgagatcccgccgcaattacagtttttcgttaacctagccgttcttaatctctcttctaatcgtctctccggtcaaatctcaccacaaatcgctctctgcgcttacttaaacgtcatcgatcttcacgataaccaactctccggtcaaattccgtttcagttcgggcttctcgctagattaacggcgtttgatgtctctaataacaaattatccggtcagattccctcgaatctggcgatgcgtaacggaaacttgccgagatttaatgcgagctcgtttatagggaacaagaaattgtttgggtatccgttggaggagatgaagaacaaaggattgtcgataatggcgattgttgggattggacttggaagtggaatcgcgagcttagtgattagcttcactggagtttgtatatggttgaagattacagagaaaaagatggaggaagaagaaggaaagataagtcactccatgcctgtttactaaacacaaacatttcgttttttttcttcttaagtataattaacggtttcttttatcacataattagttttttttttccattttgatcaaaagcatacagcaatagggagggttcattaagcgaatttagggttaattaatgctttgatcatatatacatgtttctttggttatctttggatacatattaacaaaaatcacaaggtttaagcatgaggtactaagttattgttgtatagtttttgtagttatgaaagtgtaatttataatgacatcatttatg

SEQ ID NO: 33858 - protein, 279 aa, Arabidopsis thaliana
  misc_feature (1)..(279): Ceres Seq. ID no. 13604348
MPVNHRFTFSYRLLFLIFLLSFETAQRLVTGDPNDEACLTNLRQSLEDPANNLRNWTKSFFINPCSGFSSYLHGVICNNGRIYKLSLTNLSLRGSISPFLSNCTNLQSLDLSSNQISGEIPPQLQFFVNLAVLNLSSNRLSGQISPQIALCAYLNVIDLHDNQLSGQIPFQFGLLARLTAFDVSNNKLSGQIPSNLAMRNGNLPRFNASSFIGNKKLFGYPLEEMKNKGLSIMAIVGIGLGSGIASLVISFTGVCIWLKITEKKMEEEEGKISHSMPVY

SEQ ID NO: 33859 - DNA, 1056 bp, Arabidopsis thaliana
  misc_feature (1)..(1056): Ceres Seq. ID no. 13604353
cagccatggaagaagcagatcagttatgtttagctgctaaatccggcgacttgaaaaaggttcaaactttaatttactccggcgccgacgttactcactttgataacgacggtttaacgccgttaatgcacgccgctaaaatcggaaacgcagagatagtaacggcgttactcgaatccggagctccatggaacgcattatctccatcaaatctctcagcaggagatttcgccatggaagcaggacatcaagaaactttcgatcttcttctcaaaaccgggatccaatcagagctaatcttaggaacaatcgcaagaaaccaaacaaagaacgaatattctaatcaagaatatcttcaagacagagttagtttcagtgaagacaagttaatggatagtgaaagcaaaggtgtgatgatggcttgggaaaaaccattaatggaagctcacgctaaagctatttgtctcaacggtggtcacattcttaacgttggtttcggtatgggacttgtcgatacagcgattcaacgatacaatccggttaaacacacgatcattgaagctcatcctgaagtttataagcgtatgattgaatctggttggggagagaaagagaatgtgaagattgtttttggaagatggcaagatgttcttgataagcttgatgataattcttttgatgggatcttttttgatacttatggtgagtattatgaagatttaagagagtttcatcagcatcttccgaggctgttgaagcctgatggtgtttattcgtatttcaatgggttttgtggaagcaacgcgttttttcatgttgtgtattgcaatttggtgactttggagattgagaatttagggtttagcactcagttgattccattgccggttaaggattgtcttggggatgaagtttgggaaggtgtcaagcaaaagtattggcagcttgatacttattatctccctgtttgtcagtttagtgactgaagaagttttatgataccagcaattttgcgatattgtaatttttcttactcataaaaagtagattttttat

SEQ ID NO: 33860 - protein, 327 aa, Arabidopsis thaliana
  misc_feature (1)..(327): Ceres Seq. ID no. 13604354
AMEEADQLCLAAKSGDLKKVQTLIYSGADVTHFDNDGLTPLMHAAKIGNAEIVTALLESGAPWNALSPSNLSAGDFAMEAGHQETFDLLLKTGIQSELILGTIARNQTKNEYSNQEYLQDRVSFSEDKLMDSESKGVMMAWEKPLMEAHAKAICLNGGHILNVGFGMGLVDTAIQRYNPVKHTIIEAHPEVYKRMIESGWGEKENVKIVFGRWQDVLDKLDDNSFDGIFFDTYGEYYEDLREFHQHLPRLLKPDGVYSYFNGFCGSNAFFHVVYCNLVTLEIENLGFSTQLIPLPVKDCLGDEVWEGVKQKYWQLDTYYLPVCQFSD

SEQ ID NO: 33861 - protein, 326 aa, Arabidopsis thaliana
  misc_feature (1)..(326): Ceres Seq. ID no. 13604355
MEEADQLCLAAKSGDLKKVQTLIYSGADVTHFDNDGLTPLMHAAKIGNAEIVTALLESGAPWNALSPSNLSAGDFAMEAGHQETFDLLLKTGIQSELILGTIARNQTKNEYSNQEYLQDRVSFSEDKLMDSESKGVMMAWEKPLMEAHAKAICLNGGHILNVGFGMGLVDTAIQRYNPVKHTIIEAHPEVYKRMIESGWGEKENVKIVFGRWQDVLDKLDDNSFDGIFFDTYGEYYEDLREFHQHLPRLLKPDGVYSYFNGFCGSNAFFHVVYCNLVTLEIENLGFSTQLIPLPVKDCLGDEVWEGVKQKYWQLDTYYLPVCQFSD

SEQ ID NO: 33862 - protein, 286 aa, Arabidopsis thaliana
  misc_feature (1)..(286): Ceres Seq. ID no. 13604356
MHAAKIGNAEIVTALLESGAPWNALSPSNLSAGDFAMEAGHQETFDLLLKTGIQSELILGTIARNQTKNEYSNQEYLQDRVSFSEDKLMDSESKGVMMAWEKPLMEAHAKAICLNGGHILNVGFGMGLVDTAIQRYNPVKHTIIEAHPEVYKRMIESGWGEKENVKIVFGRWQDVLDKLDDNSFDGIFFDTYGEYYEDLREFHQHLPRLLKPDGVYSYFNGFCGSNAFFHVVYCNLVTLEIENLGFSTQLIPLPVKDCLGDEVWEGVKQKYWQLDTYYLPVCQFSD

SEQ ID NO: 33863 - DNA, 1373 bp, Arabidopsis thaliana
  misc_feature (1)..(1373): Ceres Seq. ID no. 13604357
attagtggtaatttctgatcccattgctgctcctctctccggagatacaaaggcgaatctgaccagtaagaaagatggcagtcgagatggcctctcagtctcaggttttggtggaagagaaatcgagtgttagaatcttgacactaaacagaccaaagcagctgaatgctctgtccttccacatgatctctcgattgctgcaactgttccttgcatttgaggaggaccctagtgtgaaacttgtcatcctaaagggtcatgggagagccttttgtgctggtggcgatgttgcagctgttgttcgtgacatcaatcaaggtaactggagactcggtgccaattacttctcatctgaatacatgctcaactatgttatggccacatatagcaaagctcaggtttcaatcttgaatggtatcgtcatgggaggcggagctggtgtatccgtccatggtcgatttcgtattgcaactgagaacacggtttttgccatgcctgagacagctctggggctctttccagatgtaggcgcctcctacttcttgtcaaggctccctggtttttttggggagtatgttggcctcacaggagctagattagatggtgctgaaatgcttgcttgtggccttgcaactcattttgtgccttcaacgaggttgactgcattagaagcagatctttgcagaattaattcaaatgatccaacttttgcctcaacaattctcgatgcatacacccagcatccgcgcctgaaacagcagagtgcttaccgcaggttagatgttattgataggtgtttctcaaggagaacagtcgaagaaattatatctgcacttgagagagaggccactcaagaagcagatggttggatctcagctaccattcaagcattgaagaagggttcaccagcaagccttaaaatctctcttagatcgataagggaagggcgattgcagggggtggggcagtgtcttatccgcgagtatagaatggtgtgtcatgtgatgaagggagaaatcagcaaagattttgtggaggggtgcagagccatattggtagacaaagataagaacccaaagtgggagccaaggcgactggaggacatgaaggatagcatggtggagcagtacttcgagagagtggaacgggaggatgatctaaagcttccgccaaggaataacttgcctgctttagggatcgcaaagctgtgaagtggagaaggtgatggagcactattgtttacgtctgtgggaaagaaaaaagaaaataaatgtaacaacacttgtgttgaataggacttgcatacattacataaatcattattgtatttgagaattgacaccaaagcagcagagcagaattgtgttaagatt

SEQ ID NO: 33864 - protein, 378 aa, Arabidopsis thaliana
  misc_feature (1)..(378): Ceres Seq. ID no. 13604358
MAVEMASQSQVLVEEKSSVRILTLNRPKQLNALSFHMISRLLQLFLAFEEDPSVKLVILKGHGRAFCAGGDVAAVVRDINQGNWRLGANYFSSEYMLNYVMATYSKAQVSILNGIVMGGGAGVSVHGRFRIATENTVFAMPETALGLFPDVGASYFLSRLPGFFGEYVGLTGARLDGAEMLACGLATHFVPSTRLTALEADLCRINSNDPTFASTILDAYTQHPRLKQQSAYRRLDVIDRCFSRRTVEEIISALEREATQEADGWISATIQALKKGSPASLKISLRSIREGRLQGVGQCLIREYRMVCHVMKGEISKDFVEGCRAILVDKDKNPKWEPRRLEDMKDSMVEQYFERVEREDDLKLPPRNNLPALGIAKL

SEQ ID NO: 33865 - protein, 374 aa, Arabidopsis thaliana
  misc_feature (1)..(374): Ceres Seq. ID no. 13604359
MASQSQVLVEEKSSVRILTLNRPKQLNALSFHMISRLLQLFLAFEEDPSVKLVILKGHGRAFCAGGDVAAVVRDINQGNWRLGANYFSSEYMLNYVMATYSKAQVSILNGIVMGGGAGVSVHGRFRIATENTVFAMPETALGLFPDVGASYFLSRLPGFFGEYVGLTGARLDGAEMLACGLATHFVPSTRLTALEADLCRINSNDPTFASTILDAYTQHPRLKQQSAYRRLDVIDRCFSRRTVEEIISALEREATQEADGWISATIQALKKGSPASLKISLRSIREGRLQGVGQCLIREYRMVCHVMKGEISKDFVEGCRAILVDKDKNPKWEPRRLEDMKDSMVEQYFERVEREDDLKLPPRNNLPALGIAKL

SEQ ID NO: 33866 - protein, 342 aa, Arabidopsis thaliana
  misc_feature (1)..(342): Ceres Seq. ID no. 13604360
MISRLLQLFLAFEEDPSVKLVILKGHGRAFCAGGDVAAVVRDINQGNWRLGANYFSSEYMLNYVMATYSKAQVSILNGIVMGGGAGVSVHGRFRIATENTVFAMPETALGLFPDVGASYFLSRLPGFFGEYVGLTGARLDGAEMLACGLATHFVPSTRLTALEADLCRINSNDPTFASTILDAYTQHPRLKQQSAYRRLDVIDRCFSRRTVEEIISALEREATQEADGWISATIQALKKGSPASLKISLRSIREGRLQGVGQCLIREYRMVCHVMKGEISKDFVEGCRAILVDKDKNPKWEPRRLEDMKDSMVEQYFERVEREDDLKLPPRNNLPALGIAKL

SEQ ID NO: 33867 - DNA, 1781 bp, Arabidopsis thaliana
  misc_feature (1)..(1781): Ceres Seq. ID no. 13604382
cttctttcatctctttcttttattaatcccctttcttttctaactttctcgattcatcagagccatgggtgtctgtttctccgccattagagtcactggtgctagcagcagtagacgaagcagtcagaccaaatccaaggctgctcctactcccatcgataccaaggcctctaccaaacgccgaaccggctccatcccctgcggcaagcgtaccgattttggctactccaaagacttccacgatcactacaccatcggcaagttgctcggccatggtcaattcggctacacctacgtcgccatccacagacccaatggagatcgcgtcgccgtcaaaagactcgataagtctaagatggttcttcctattgctgttgaggatgtcaagcgtgaggttcagattcttattgctctctctggccacgagaatgttgttcagtttcacaatgcctttgaggatgacgattacgtctatattgttatggagttgtgcgaaggaggcgaattgctggataggatattatccaagaaaggtaatcggtactccgagaaagatgcagccgttgtcgttaggcagatgctcaaagttgcaggagaatgtcatctacacggtcttgtacatagagatatgaaaccagagaactttttgttcaaatcagctcaactagattcgcctctaaaggctacggattttggtttatcggattttatcaaaccagggaaaaggttccatgacattgttggtagcgcctattatgtggctcctgaggtattaaagcgcagatcagggcctgaatcagatgtatggagcattggtgtgattacgtatatattactttgtgggaggcggcctttttgggatagaactgaagatggtatatttaaagaggttttaagaaataaacctgacttcagccgtaaaccttgggcaactataagtgacagcgccaaagattttgtgaaaaagttacttgtaaaagacccacgagcacggctaactgctgcacaagcactatcacatgcgtgggttagagaaggcgggaatgctactgatatccctgtcgacatttcagttctgaacaacttaagacaatttgtgagatacagccgtctaaagcaatttgctttaagggcgcttgctagcacacttgacgaggcagagatctctgacctcagagatcaatttgatgcgattgatgtggataaaaatggcgtcattagtcttgaagagatgagacaggcacttgccaaagatcttccttggaaactgaaagactcacgagttgctgagatccttgaagcgattgatagcaacactgatgggttagtggacttcacagagtttgtagcagcagctctacatgttcatcaactagaagaacatgattcagagaaatggcagctaaggtcaagagcagcttttgagaaattcgacctagacaaagacgggtacataacgcctgaggaacttcgaatgcacacggggttaagaggatcaatagatccactgctggatgaagcagacatagacagagatgggaaaataagcctgcatgagttcaggagacttctaagaacagcgagcataagttcacagagagcaccaagccctgcaggtcacaggaatcttcgatagtatatactagaagaggagtaagtaaaggatacagaatgtaatttgttgggatgtgatatgtcttatcttcttatatgtaatgttggttgtaagataagtggggtattttggcgtttgtagtgataagtaagtaatactttggttg

SEQ ID NO: 33868 - protein, 523 aa, Arabidopsis thaliana
  misc_feature (1)..(523): Ceres Seq. ID no. 13604383
MGVCFSAIRVTGASSSRRSSQTKSKAAPTPIDTKASTKRRTGSIPCGKRTDFGYSKDFHDHYTIGKLLGHGQFGYTYVAIHRPNGDRVAVKRLDKSKMVLPIAVEDVKREVQILIALSGHENVVQFHNAFEDDDYVYIVMELCEGGELLDRILSKKGNRYSEKDAAVVVRQMLKVAGECHLHGLVHRDMKPENFLFKSAQLDSPLKATDFGLSDFIKPGKRFHDIVGSAYYVAPEVLKRRSGPESDVWSIGVITYILLCGRRPFWDRTEDGIFKEVLRNKPDFSRKPWATISDSAKDFVKKLLVKDPRARLTAAQALSHAWVREGGNATDIPVDISVLNNLRQFVRYSRLKQFALRALASTLDEAEISDLRDQFDAIDVDKNGVISLEEMRQALAKDLPWKLKDSRVAEILEAIDSNTDGLVDFTEFVAAALHVHQLEEHDSEKWQLRSRAAFEKFDLDKDGYITPEELRMHTGLRGSIDPLLDEADIDRDGKISLHEFRRLLRTASISSQRAPSPAGHRNLR

SEQ ID NO: 33869 - protein, 426 aa, Arabidopsis thaliana
  misc_feature (1)..(426): Ceres Seq. ID no. 13604384
MVLPIAVEDVKREVQILIALSGHENVVQFHNAFEDDDYVYIVMELCEGGELLDRILSKKGNRYSEKDAAVVVRQMLKVAGECHLHGLVHRDMKPENFLFKSAQLDSPLKATDFGLSDFIKPGKRFHDIVGSAYYVAPEVLKRRSGPESDVWSIGVITYILLCGRRPFWDRTEDGIFKEVLRNKPDFSRKPWATISDSAKDFVKKLLVKDPRARLTAAQALSHAWVREGGNATDIPVDISVLNNLRQFVRYSRLKQFALRALASTLDEAEISDLRDQFDAIDVDKNGVISLEEMRQALAKDLPWKLKDSRVAEILEAIDSNTDGLVDFTEFVAAALHVHQLEEHDSEKWQLRSRAAFEKFDLDKDGYITPEELRMHTGLRGSIDPLLDEADIDRDGKISLHEFRRLLRTASISSQRAPSPAGHRNLR

SEQ ID NO: 33870 - protein, 384 aa, Arabidopsis thaliana
  misc_feature (1)..(384): Ceres Seq. ID no. 13604385
MELCEGGELLDRILSKKGNRYSEKDAAVVVRQMLKVAGECHLHGLVHRDMKPENFLFKSAQLDSPLKATDFGLSDFIKPGKRFHDIVGSAYYVAPEVLKRRSGPESDVWSIGVITYILLCGRRPFWDRTEDGIFKEVLRNKPDFSRKPWATISDSAKDFVKKLLVKDPRARLTAAQALSHAWVREGGNATDIPVDISVLNNLRQFVRYSRLKQFALRALASTLDEAEISDLRDQFDAIDVDKNGVISLEEMRQALAKDLPWKLKDSRVAEILEAIDSNTDGLVDFTEFVAAALHVHQLEEHDSEKWQLRSRAAFEKFDLDKDGYITPEELRMHTGLRGSIDPLLDEADIDRDGKISLHEFRRLLRTASISSQRAPSPAGHRNLR

SEQ ID NO: 33871 - DNA, 810 bp, Arabidopsis thaliana
  misc_feature (1)..(810): Ceres Seq. ID no. 13604386
ggcctccacttttgtttttccacttctacggtaagtgaaagagagagagagagaggaaaaaaaaggggaaagcttaagatattggagagtaacaatgccttcaaattcaggagatgataatgttcttcaagttctcataaagaactttgatgtccttgctctcccattggttacactcgtctatcctctatatgcatcagtgaaagcaatagagacaagatcattaccagaagatgaacaatggcttacttactgggttctttacgcacttatctctctctttgaactcactttctccaaacctctcgagtggtttcctatatggccatacatgaagttgtttgggatctgttggttagtgttaccacaattcaatggagcagaacatatctacaaacatttcattagaccattctacagagatcctcaaagagctaccaccaaaatttggtatgttcctcacaagaaattcaatttcttccctaaacgcgacgacgacgacattctcactgctgctgaaaaatacatggaacaacacggtaccgaagcgtttgagcgaatgatcgttaagaaggatagttatgaaagaggtaggagtagtagaggaatcaataatcacatgatctttgatgatgactataggtactaataagttcttaaaccggtttaattagctactttcagtttataagtttgctatgtgacaatatattgtctgtttctatggttgttataatttgcgtggattatgtataagcccttatttaggactgcttatttttgtgaaaaatcaaataaacattttctctc

SEQ ID NO: 33872 - protein, 184 aa, Arabidopsis thaliana
  misc_feature (1)..(184): Ceres Seq. ID no. 13604387
MPSNSGDDNVLQVLIKNFDVLALPLVTLVYPLYASVKAIETRSLPEDEQWLTYWVLYALISLFELTFSKPLEWFPIWPYMKLFGICWLVLPQFNGAEHIYKHFIRPFYRDPQRATTKIWYVPHKKFNFFPKRDDDDILTAAEKYMEQHGTEAFERMIVKKDSYERGRSSRGINNHMIFDDDYRY

SEQ ID NO: 33873 - protein, 105 aa, Arabidopsis thaliana
  misc_feature (1)..(105): Ceres Seq. ID no. 13604388
MKLFGICWLVLPQFNGAEHIYKHFIRPFYRDPQRATTKIWYVPHKKFNFFPKRDDDDILTAAEKYMEQHGTEAFERMIVKKDSYERGRSSRGINNHMIFDDDYRY

SEQ ID NO: 33874 - DNA, 552 bp, Arabidopsis thaliana
  misc_feature (1)..(552): Ceres Seq. ID no. 13604399
cccatatatatctcacgcgttgtcctcgtcttctccgtcttacactgatttaattctcctaccaatctcaacttccgacgtctattcatcatgggtttgaaggaggaatttgaggagcacgctgagaaagtgaatacgctcacggagttgccatccaacgaggatttgctcattctctacggactctacaagcaagccaagtttgggcctgtggacaccagtcgtcctggaatgttcagcatgaaggagagagccaagtgggatgcttggaaggctgttgaagggaaatcatcggaagaagccatgaatgactatatcactaaggtcaagcaactcttggaagttgctgcttccaaggcttcaacctgatgaatcaaatcctcatctgcagtaactttatcttaagcatcaaaataacattgcataagacttgttcttgctcttgtgtttctatcatatttaagctatctactttgtgacatggtgtgatctcttaaaaatgcttgatattggttaaaacagagaatcatgatgcaaactaaatccataagt

SEQ ID NO: 33875 - protein, 92 aa, Arabidopsis thaliana
  misc_feature (1)..(92): Ceres Seq. ID no. 13604400
MGLKEEFEEHAEKVNTLTELPSNEDLLILYGLYKQAKFGPVDTSRPGMFSMKERAKWDAWKAVEGKSSEEAMNDYITKVKQLLEVAASKAST

SEQ ID NO: 33876 - DNA, 799 bp, Arabidopsis thaliana
  misc_feature (1)..(799): Ceres Seq. ID no. 13604407
ttttctctcaaaatccataaaaagagagagagataaataaagagaaaactaaagaagctagaagatggagaaaagtaatgatcatgacaaggctagccacggcggctccggtggtggtgccacggagaagtgggaggagactagcctcggaatccgaactgccgagacaatgctccggttagctccggtgggcctttgtgttgcagcacttgttgtcatgcttaaggactctgagactaatgagttcggttcaatttcttactccaatctcacagcctttaggtacttggtgcacgcaaatggaatatgtgcaggctactctcttctatcagcagccattgcagcgatgcctcgttcttcttcgacaatgcctcgtgtttggaccttcttttgtctcgaccagcttctgacctacctggttcttgctgctggagctgtatcagctgaggttctatacttggcttacaatggagactcagccattacttggagcgatgcatgtagctcctatggcggtttctgtcatagagccactgcttctgttataatcacattctttgtggtttgtttctacatcgttctctctctaatctcctcttataagctctttactcgctttgatcctccttccattgttgactccgccaagaatctcgaagtcgctgtcttcggaagttagatcctccatttgctcttcaagtacatctagtttgtcatgtttcaaatgttgtgtgtttttaactttggtcaagagaaagaatgcttatgtgtttgctcttctttcattgcttttcttcct

SEQ ID NO: 33877 - protein, 204 aa, Arabidopsis thaliana
  misc_feature (1)..(204): Ceres Seq. ID no. 13604408
MEKSNDHDKASHGGSGGGATEKWEETSLGIRTAETMLRLAPVGLCVAALVVMLKDSETNEFGSISYSNLTAFRYLVHANGICAGYSLLSAAIAAMPRSSSTMPRVWTFFCLDQLLTYLVLAAGAVSAEVLYLAYNGDSAITWSDACSSYGGFCHRATASVIITFFVVCFYIVLSLISSYKLFTRFDPPSIVDSAKNLEVAVFGS

SEQ ID NO: 33878 - protein, 169 aa, Arabidopsis thaliana
  misc_feature (1)..(169): Ceres Seq. ID no. 13604409
MLRLAPVGLCVAALVVMLKDSETNEFGSISYSNLTAFRYLVHANGICAGYSLLSAAIAAMPRSSSTMPRVWTFFCLDQLLTYLVLAAGAVSAEVLYLAYNGDSAITWSDACSSYGGFCHRATASVIITFFVVCFYIVLSLISSYKLFTRFDPPSIVDSAKNLEVAVFGS

SEQ ID NO: 33879 - protein, 153 aa, Arabidopsis thaliana
  misc_feature (1)..(153): Ceres Seq. ID no. 13604410
MLKDSETNEFGSISYSNLTAFRYLVHANGICAGYSLLSAAIAAMPRSSSTMPRVWTFFCLDQLLTYLVLAAGAVSAEVLYLAYNGDSAITWSDACSSYGGFCHRATASVIITFFVVCFYIVLSLISSYKLFTRFDPPSIVDSAKNLEVAVFGS

SEQ ID NO: 33880 - DNA, 2441 bp, Arabidopsis thaliana
  misc_feature (1)..(2441): Ceres Seq. ID no. 13604427
atgtttcgtttcgttttggaaagataagagagataaaggtttcgacttttttaggtttttctgtgtgttttgtgattcatttcgctgattgatatcaattctctctgtttgttgtcccttctcttcaatttcacctgacttttgtttttgttttggataaagttttcacctttgtgtcttctctctgctctcttgtgtgatctatctgaaaaaggctgatttttttttttgtgggtttctaaattagggtttgtgtgagtttattgtctttctgattcgatgaagatcaagagttatagaggatcgttagagtgatcaaaatcccacgaattcacaaaggatccgtcttcatagatccgtcagatctgttcagcggaggtacatacttcttcgtcattcactgctttctggattagttggtgagaataaacggctggtgggtctcggtgggaagctgaattggatgtagagttcatcagactatagcttagagaagaaaatgaagttttttgaatcgttttgctccagttgaggtttggaagctgcataccagctcatggaagagatttcacctgcagttgcacttactttgggtttagctaatacgatgtgtgactctggaatctcatctactttcgatatctccgagctggagaatgttactgatgcagctgacatgttgtgtaatcagaaaagacaaagatatagtaatggagtggtggattgtattatgggaagtgtttcagaagagaagactttatctgaagtgagaagtttgtcttctgattttagtgtaactgtccaggaatcagaagaagatgagccattagtatctgatgcgactattattagcgaaggtttaatagttgtggacgctaggtctgagataagtttgccagatacagttgaaactgataacgggcgagttcttgctacggccattatcctaaacgagacaaccatagaacaggttcccactgcagaagtccttattgcgagtctgaatcacgatgtgaatatggaggtggcaacttctgaggtagtcattaggttacctgaagaaaatcctaatgtagcaagaggaagcaggagtgtttatgaactagagtgtatacctctttggggcacgatttcaatttgcggtggaagatctgaaatggaggatgctgttagagctttacctcattttctcaaaatacccatcaaaatgcttatgggggatcatgaagggatgagtccaagtctcccatatctcactagtcacttctttggtgtatatgatggccacggaggcgctcaggttgctgactattgccatgatagaatccactctgctttggctgaagaaatcgaacggattaaagaggaattgtgtaggaggaacactggcgagggtaggcaggtccagtgggagaaagtctttgtagattgttacctaaaagtcgatgatgaggttaaagggaaaatcaacagacctgttgttggttcttctgataggatggttcttgaagctgtttcccctgaaaccgttggatcgactgctgtggttgctttggtttgttcatcgcatataatagtctcaaactgtggtgactcaagagcagttttactccgaggcaaagactccatgcctttatcagttgatcacaaaccagatagagaggatgagtatgcacgaatagagaaagctggaggaaaagttatacaatggcaaggcgctcgtgtttctggcgttcttgccatgtccaggtccatcggtgatcaatatctggagccatttgtaataccagatcccgaagtgacgtttatgccacgagctagagaagacgagtgtctaatattggccagtgatggactttgggacgtaatgagtaaccaagaagcttgcgattttgcgaggaggcggatcttggcttggcacaagaagaatggagcattgcctttagctgagagaggtgtaggagaagaccaagcgtgtcaagctgcggctgaatatctctccaaactcgctattcaaatgggaagcaaagacaatatctcaatcatagtgatcgacttgaaagctcaaagaaagttcaagaccagatcttgaaacagtgtatgctcgagctcttacactattataattttattatttcttatttattgaaaaaatttccacaagtttacataaaaataagaagtgaaatgttggggggaagaagaattaagaccttgatgcatagctgaagtccattcctttttctcatggacttgaatgtgtatgtttgttatgtataagaagaatagagaagaaatgtttttactttggagtcttgtaggtggatatgttgttgtaatattggagatgtggcttaaggaattgtaactgaaatttatgtcacattcaccttaatacttttctgtaatctattatatataaatacttgttgtgaaagaac

SEQ ID NO: 33881 - protein, 511 aa, Arabidopsis thaliana
  misc_feature (1)..(511): Ceres Seq. ID no. 13604428
MEEISPAVALTLGLANTMCDSGISSTFDISELENVTDAADMLCNQKRQRYSNGVVDCIMGSVSEEKTLSEVRSLSSDFSVTVQESEEDEPLVSDATIISEGLIVVDARSEISLPDTVETDNGRVLATAIILNETTIEQVPTAEVLIASLNHDVNMEVATSEVVIRLPEENPNVARGSRSVYELECIPLWGTISICGGRSEMEDAVRALPHFLKIPIKMLMGDHEGMSPSLPYLTSHFFGVYDGHGGAQVADYCHDRIHSALAEEIERIKEELCRRNTGEGRQVQWEKVFVDCYLKVDDEVKGKINRPVVGSSDRMVLEAVSPETVGSTAVVALVCSSHIIVSNCGDSRAVLLRGKDSMPLSVDHKPDREDEYARIEKAGGKVIQWQGARVSGVLAMSRSIGDQYLEPFVIPDPEVTFMPRAREDECLILASDGLWDVMSNQEACDFARRRILAWHKKNGALPLAERGVGEDQACQAAAEYLSKLAIQMGSKDNISIIVIDLKAQRKFKTRS

SEQ ID NO: 33882 - protein, 494 aa, Arabidopsis thaliana
  misc_feature (1)..(494): Ceres Seq. ID no. 13604429
MCDSGISSTFDISELENVTDAADMLCNQKRQRYSNGVVDCIMGSVSEEKTLSEVRSLSSDFSVTVQESEEDEPLVSDATIISEGLIVVDARSEISLPDTVETDNGRVLATAIILNETTIEQVPTAEVLIASLNHDVNMEVATSEVVIRLPEENPNVARGSRSVYELECIPLWGTISICGGRSEMEDAVRALPHFLKIPIKMLMGDHEGMSPSLPYLTSHFFGVYDGHGGAQVADYCHDRIHSALAEEIERIKEELCRRNTGEGRQVQWEKVFVDCYLKVDDEVKGKINRPVVGSSDRMVLEAVSPETVGSTAVVALVCSSHIIVSNCGDSRAVLLRGKDSMPLSVDHKPDREDEYARIEKAGGKVIQWQGARVSGVLAMSRSIGDQYLEPFVIPDPEVTFMPRAREDECLILASDGLWDVMSNQEACDFARRRILAWHKKNGALPLAERGVGEDQACQAAAEYLSKLAIQMGSKDNISIIVIDLKAQRKFKTRS

SEQ ID NO: 33883 - protein, 471 aa, Arabidopsis thaliana
  misc_feature (1)..(471): Ceres Seq. ID no. 13604430
MLCNQKRQRYSNGVVDCIMGSVSEEKTLSEVRSLSSDFSVTVQESEEDEPLVSDATIISEGLIVVDARSEISLPDTVETDNGRVLATAIILNETTIEQVPTAEVLIASLNHDVNMEVATSEVVIRLPEENPNVARGSRSVYELECIPLWGTISICGGRSEMEDAVRALPHFLKIPIKMLMGDHEGMSPSLPYLTSHFFGVYDGHGGAQVADYCHDRIHSALAEEIERIKEELCRRNTGEGRQVQWEKVFVDCYLKVDDEVKGKINRPVVGSSDRMVLEAVSPETVGSTAVVALVCSSHIIVSNCGDSRAVLLRGKDSMPLSVDHKPDREDEYARIEKAGGKVIQWQGARVSGVLAMSRSIGDQYLEPFVIPDPEVTFMPRAREDECLILASDGLWDVMSNQEACDFARRRILAWHKKNGALPLAERGVGEDQACQAAAEYLSKLAIQMGSKDNISIIVIDLKAQRKFKTRS

SEQ ID NO: 33884 - DNA, 1178 bp, Arabidopsis thaliana
  misc_feature (1)..(1178): Ceres Seq. ID no. 13604438
attatcttttgcttcatcttcttcaaaagccatggctttgtgctctatctgtcctcgcatccctcttcgattcaggccaaaacccatttccccttttctctcaaaacctcaaatttgtctcgcttacagggtttactcttccctgcaatctactactccctctaccagagatgaacttggaactgttagcattgggtttctgggtatgggaatcatgggttctccaatggcacagaacctcatcaaagctgggtgtgatgtgactgtatggaatcgaactaagagcaaatgtgatcctctcgttggattaggagcaaagtacaagtcttctcctgaagaagtgactgcaacttgtgatctcacatttgcaatgcttgctgatcctgaaagtgcaattgatgttgcatgtggaaagaatggagccatatttgggattagttcaggaaaagggtatgttgatgtctcaaccgttgatgtggcctcatcaatactaatcagcaagcaaataaaggataccggagccttgttcttggaggcaccagtttcaggttccaaaaagcctgccgaagatgggcagttaatatttctcactgcaggtgacaagccgctatacgaaaaagctgctcctttcttagacatcatgggaaagtcaaaattctatttgggtgaagttggtaatggagcagcaatgaaacttgtcgtcaacatgatcatgggaagtatgatggcatcattcgcggagggaatacttctaagccagaaagttggactcgatccaaatgtacttgtcgaggttgtctcacagggagctatcaatgcgccaatgtactcactaaagggtccttcaatgatcaagtcagtgtacccgacggcttttccattaaagcatcagcagaaggatatgagactcgcacttggactagcggaatccgtatcgcaatctactccgattgcagccgctgcgaacgagctttacaaggttgcaaaatcttatgggttgagcgatgaagatttctctgcagtaattgaagcactaaaagctgcaaaatcccgagaagcttagctaaagatttgttcaatgtgaaaatgtgtttttttttgctgttgtatgaaaaatttcatctttacaacatgtcaattgataattgttaattttatatgagagcaagttaaaagtg

SEQ ID NO: 33885 - protein, 353 aa, Arabidopsis thaliana
  misc_feature (1)..(353): Ceres Seq. ID no. 13604439
LSFASSSSKAMALCSICPRIPLRFRPKPISPFLSKPQICLAYRVYSSLQSTTPSTRDELGTVSIGFLGMGIMGSPMAQNLIKAGCDVTVWNRTKSKCDPLVGLGAKYKSSPEEVTATCDLTFAMLADPESAIDVACGKNGAIFGISSGKGYVDVSTVDVASSILISKQIKDTGALFLEAPVSGSKKPAEDGQLIFLTAGDKPLYEKAAPFLDIMGKSKFYLGEVGNGAAMKLVVNMIMGSMMASFAEGILLSQKVGLDPNVLVEVVSQGAINAPMYSLKGPSMIKSVYPTAFPLKHQQKDMRLALGLAESVSQSTPIAAAANELYKVAKSYGLSDEDFSAVIEALKAAKSREA

SEQ ID NO: 33886 - protein, 343 aa, Arabidopsis thaliana
  misc_feature (1)..(343): Ceres Seq. ID no. 13604440
MALCSICPRIPLRFRPKPISPFLSKPQICLAYRVYSSLQSTTPSTRDELGTVSIGFLGMGIMGSPMAQNLIKAGCDVTVWNRTKSKCDPLVGLGAKYKSSPEEVTATCDLTFAMLADPESAIDVACGKNGAIFGISSGKGYVDVSTVDVASSILISKQIKDTGALFLEAPVSGSKKPAEDGQLIFLTAGDKPLYEKAAPFLDIMGKSKFYLGEVGNGAAMKLVVNMIMGSMMASFAEGILLSQKVGLDPNVLVEVVSQGAINAPMYSLKGPSMIKSVYPTAFPLKHQQKDMRLALGLAESVSQSTPIAAAANELYKVAKSYGLSDEDFSAVIEALKAAKSREA

SEQ ID NO: 33887 - protein, 285 aa, Arabidopsis thaliana
  misc_feature (1)..(285): Ceres Seq. ID no. 13604441
MGIMGSPMAQNLIKAGCDVTVWNRTKSKCDPLVGLGAKYKSSPEEVTATCDLTFAMLADPESAIDVACGKNGAIFGISSGKGYVDVSTVDVASSILISKQIKDTGALFLEAPVSGSKKPAEDGQLIFLTAGDKPLYEKAAPFLDIMGKSKFYLGEVGNGAAMKLVVNMIMGSMMASFAEGILLSQKVGLDPNVLVEVVSQGAINAPMYSLKGPSMIKSVYPTAFPLKHQQKDMRLALGLAESVSQSTPIAAAANELYKVAKSYGLSDEDFSAVIEALKAAKSREA

SEQ ID NO: 33888 - DNA, 1467 bp, Arabidopsis thaliana
  misc_feature (1)..(1467): Ceres Seq. ID no. 13604445
acgataagtgaaaaaagagagaaagagccagaggagagagagaagcttttggtcgtgttcgtttttctttctttctttcttgcaataataaatagaagcaaatcatactccaaaaaccttcattcaaaccttgctaccactttcttcccctaaaagatttcatctaaattcagtaaactcatctacgagttcttgtttttctttaaattttctaagagagagcctaagctgtttaatatagtcatctaatatttagagagatggtgggagagagaatgtggtggtggtcatcatcgtcgacgaaactccgatcaaaccttgaaagatttctcagaggaatcactccaaaacctccttctttctctttatcacagagctgcaagaatgatttgaacagtttgtggatccatgagaacaaagatgagattgaatatttcaggcttagtgatctttgggactgttttgatgagccaagcgcgtatggacttggatcaaaggtcgacttaaacaatggtgaatccgttatgcagtactatgtcccgtatctatccgccattcaaatctatactaacaaatctacagccatttctaggattcatagtgatgtggttgattgtgagagtgaatgttggagtgatgatagtgagattgagaagttgtctaggtcaatgagcagtggttctagcaaaatatgggattctgtttctgatgattcgggttatgagatcgatggtacttcttcattgatgcgagataagctcggttctattgattttcagtactttgagtccgttaaaccgcacttgcgtgttcctcttaccgctaaggtaaatgaattggctgagaagtatccgggactttcgactctaaggagtgttgatttgtctccagcaagttggttggccattgcttggtatccaatttaccacattccctctcggaagaccgataaagatttatcgacatgtttcttgagttatcatactttatcttcggctttccaaggtaacttgatagagggagacgatgagattaacgaaaccatgaaagaagaaacattgtgttttgatgaaggaccggtgaccaagagtatacctttggctccttttggtttagttagttacaaattgcaaggagatttgtggaggaatcaagaatgtggtgaccaaggacgtatagtttatcttcgcagtgcagctgattcgtggctgaaacagcttaatgttcaagatcaccatgaccatagcttcttctccatgaacatgagcttgtagatccaaaaaaagagagccaagactctgtttttttgctctgtttttagttgttttcttagccaagactctgtttttttgctctgtttttagttgttttaagaatcttaggtatatagcaactcgaaatgtagaggtttcgtttccttctgcttgaacccgtggaaaataaagagaattaggcttgtttttggct

SEQ ID NO: 33889 - protein, 337 aa, Arabidopsis thaliana
  misc_feature (1)..(337): Ceres Seq. ID no. 13604446
MVGERMWWWSSSSTKLRSNLERFLRGITPKPPSFSLSQSCKNDLNSLWIHENKDEIEYFRLSDLWDCFDEPSAYGLGSKVDLNNGESVMQYYVPYLSAIQIYTNKSTAISRIHSDVVDCESECWSDDSEIEKLSRSMSSGSSKIWDSVSDDSGYEIDGTSSLMRDKLGSIDFQYFESVKPHLRVPLTAKVNELAEKYPGLSTLRSVDLSPASWLAIAWYPIYHIPSRKTDKDLSTCFLSYHTLSSAFQGNLIEGDDEINETMKEETLCFDEGPVTKSIPLAPFGLVSYKLQGDLWRNQECGDQGRIVYLRSAADSWLKQLNVQDHHDHSFFSMNMSL

SEQ ID NO: 33890 - protein, 332 aa, Arabidopsis thaliana
  misc_feature (1)..(332): Ceres Seq. ID no. 13604447
MWWWSSSSTKLRSNLERFLRGITPKPPSFSLSQSCKNDLNSLWIHENKDEIEYFRLSDLWDCFDEPSAYGLGSKVDLNNGESVMQYYVPYLSAIQIYTNKSTAISRIHSDVVDCESECWSDDSEIEKLSRSMSSGSSKIWDSVSDDSGYEIDGTSSLMRDKLGSIDFQYFESVKPHLRVPLTAKVNELAEKYPGLSTLRSVDLSPASWLAIAWYPIYHIPSRKTDKDLSTCFLSYHTLSSAFQGNLIEGDDEINETMKEETLCFDEGPVTKSIPLAPFGLVSYKLQGDLWRNQECGDQGRIVYLRSAADSWLKQLNVQDHHDHSFFSMNMSL

SEQ ID NO: 33891 - protein, 249 aa, Arabidopsis thaliana
  misc_feature (1)..(249): Ceres Seq. ID no. 13604448
MQYYVPYLSAIQIYTNKSTAISRIHSDVVDCESECWSDDSEIEKLSRSMSSGSSKIWDSVSDDSGYEIDGTSSLMRDKLGSIDFQYFESVKPHLRVPLTAKVNELAEKYPGLSTLRSVDLSPASWLAIAWYPIYHIPSRKTDKDLSTCFLSYHTLSSAFQGNLIEGDDEINETMKEETLCFDEGPVTKSIPLAPFGLVSYKLQGDLWRNQECGDQGRIVYLRSAADSWLKQLNVQDHHDHSFFSMNMSL

SEQ ID NO: 33892 - DNA, 621 bp, Arabidopsis thaliana
  misc_feature (1)..(621): Ceres Seq. ID no. 13604449
ttcttatctcctcacactcttcgaacaaggaagaaccctaatctcaagatgaatagggagaagttgatgaagatggctaataccgtccgcactggcggaaagggtactgtcagaagaaagaagaaggctgtgcacaagaccaatacaactgatgacaagaggcttcaaagcactcttaagagaattggagttaactccattcccgctattgaagaagttaacatctttaaggatgatgttgttattcagttcatcaaccctaaggttcaagcttcaattgctgcaaacacatgggttgttagcggttctcctcagaccaaaaaattgcaagatatccttcctcagatcatcagccaacttggaccagacaacatggacaacctgaagaagctagcagaacagttccagaaacaggcttctggtgaaggtaatgccgcctcagcaaccatacaagaagaggatgatgacgatgtcccagagcttgttggagagacattcgaaactgctgctgaagagaaagcaccagctgctgctgcttcttcttagagagaaaagagcgagaccacatccaaaaaaaaaccgcactttgatttttacatatctttataatatgtttgttcg

SEQ ID NO: 33893 - protein, 181 aa, Arabidopsis thaliana
  misc_feature (1)..(181): Ceres Seq. ID no. 13604450
FLSPHTLRTRKNPNLKMNREKLMKMANTVRTGGKGTVRRKKKAVHKTNTTDDKRLQSTLKRIGVNSIPAIEEVNIFKDDVVIQFINPKVQASIAANTWVVSGSPQTKKLQDILPQIISQLGPDNMDNLKKLAEQFQKQASGEGNAASATIQEEDDDDVPELVGETFETAAEEKAPAAAASS

SEQ ID NO: 33894 - protein, 165 aa, Arabidopsis thaliana
  misc_feature (1)..(165): Ceres Seq. ID no. 13604451
MNREKLMKMANTVRTGGKGTVRRKKKAVHKTNTTDDKRLQSTLKRIGVNSIPAIEEVNIFKDDVVIQFINPKVQASIAANTWVVSGSPQTKKLQDILPQIISQLGPDNMDNLKKLAEQFQKQASGEGNAASATIQEEDDDDVPELVGETFETAAEEKAPAAAASS

SEQ ID NO: 33895 - protein, 159 aa, Arabidopsis thaliana
  misc_feature (1)..(159): Ceres Seq. ID no. 13604452
MKMANTVRTGGKGTVRRKKKAVHKTNTTDDKRLQSTLKRIGVNSIPAIEEVNIFKDDVVIQFINPKVQASIAANTWVVSGSPQTKKLQDILPQIISQLGPDNMDNLKKLAEQFQKQASGEGNAASATIQEEDDDDVPELVGETFETAAEEKAPAAAASS

SEQ ID NO: 33896 - DNA, 1494 bp, Arabidopsis thaliana
  misc_feature (1)..(1494): Ceres Seq. ID no. 13604457
aattgtcaaaaactcacaaggcattatcatgtggacatgcaaccttttttttctatacgcattacagaaatgaaaacaatgattaggatcgcatgcacgtcaagaaaacaacctatagctgtactttgatatactaactcaaatcatgtcttggctcaagcacacaagcttctagctagatacaactgcaaacatatatgatggctttgtctaataagaagacgacgacttgggcaccgctttgaccagtcaatacaccaaatctgtatgtatcatttatataaatattatctttccacagttgttgaagaatcacatagacagcacacacggattccatggagactaaacagagtatccctctcctcatgccctataagatgggacccttcaatctttctcacagggttgttttggcgccattgactagatcgagatcgtatggtaacattcctcagcctaatgccaaattatattacactcagagaacaacacctggtggtcttcttatttccgaatcctgtgtagtctccgagacatcattgggctatccggatttacctggattatggaacagagaccaagtggaggcatggaagcccatcgtggatgcggttcattcgaaaggcggtatcttcttctgccagatttggcatggtggcagagtttttcatcaagaccagccaaatggggaagcacccgtctcctctacagacaagccattgatgtgcaagaacatgtatggaggtcagtttaagcctccacggcggttaaggagcgacgagcttcccgccattgtcaacgactttagaatcgctgcacgaaacgcgatcgaagctggcttcgatggagtggaggttcacggcgcacatggttacctgatcgatcagttcctgaaagacaaagtgaatgacagaagtgaccaatatggtgggtcattagagaaccgctgtagatttgctcttgaagtaatcgaagcagtggtgaacgagatcggttcagatcgtgttggaatcagactctcgccatttgcagattacatggagtcaggagactcgaatccagaagcattagggctctacctggtgcaagctatgaacaagcatggcatggagtcgtctacggtcacatggttgaacctagaatgaaaacccttgaaggaatcttcgaatgcacggaatcgcttacgcccatgcgaaaagccttcaaaggtacgttcatagtagcaggaggatattctagagaagacgggaacaaggcggtggaagagggaagaaccgatcttgtggcttatggacggccgttcttggcgaatccggatctgacgaggagattcgaactcaatgagccgttgaataggtacgatagatcaacgttctacacttcagatcctgtagtgggctatacagactaccctttcctcgagaccacagatacaacaactgcttaaggggtttattcagatgcattattagcaaaacatatttttcaatc

SEQ ID NO: 33897 - protein, 269 aa, Arabidopsis thaliana; identical to SEQ ID NO: 2353
  misc_feature (1)..(269): Ceres Seq. ID no. 13604458

SEQ ID NO: 33898 - protein, 259 aa, Arabidopsis thaliana; identical to SEQ ID NO: 2354
  misc_feature (1)..(259): Ceres Seq. ID no. 13604459

SEQ ID NO: 33899 - protein, 255 aa, Arabidopsis thaliana; identical to SEQ ID NO: 2355
  misc_feature (1)..(255): Ceres Seq. ID no. 13604460

SEQ ID NO: 33900 - DNA, 1073 bp, Arabidopsis thaliana
  misc_feature (1)..(1073): Ceres Seq. ID no. 13604467
acgaaacataattatcaaattcaaacaacaacaaaaaaacactctctccctctccgtatctatttaaaatccgatcaggttaatcgagtttatcatttggagaaagcaaatttccaaaaatgtttcgagttagcaatttcatggttggtctagcaaacacattggtgatgttagtgggcgcttcggccattggttattcgatttacatgttcgttcaccaaggcgtcactgattgtgaatctgccattcggataccacttctcacgaccggactcatcctcttcttggtgtctttgctcggagtgattggatcttgtttcaaggagaatttggcaatggtttcctacttgatcatattgtttgggggcattgttgcattgatgattttctccatatttctcttctttgtgaccaacaaaggagccggtcgtgtggtgtccggtcgagggtataaagagtaccggacggtggatttctcgacgtggcttaatgggttcgttggtgggaagagatgggttgggataaggtcttgtttggctgaggctaacgtttgtgatgatttgagtgatggtcgtgttagtcagatcgctgatgcgttttatcacaagaacttgtctcccatccagtcaggttgttgtaagccaccatcggattgcaacttcgagttcagaaacgcgacgttctggataccgccgagcaaaaacgaaacggcagttgcggaaaacggggactgtggtacgtggagcaacgtgcaaacagagttatgtttcaactgcaacgcatgcaaagcgggtgtgttagcgaacataagagagaagtggaggaatcttcttgttttcaacatttgtctcctcattctcctcataaccgtctattcctgcggttgctgtgctcgtcgtaacaatcggacggctaggaaaagtgattctgtctgatcaacaactcaatttcagtttcttgtgtttttctgttttcttagtttgtttggttttttaagttaattatcttttgttttctttggacaatgtcatgttctgtttctcaacaattatcatgaatttatcacatttcac

SEQ ID NO: 33901 - protein, 271 aa, Arabidopsis thaliana
  misc_feature (1)..(271): Ceres Seq. ID no. 13604468
MFRVSNFMVGLANTLVMLVGASAIGYSIYMFVHQGVTDCESAIRIPLLTTGLILFLVSLLGVIGSCFKENLAMVSYLIILFGGIVALMIFSIFLFFVTNKGAGRVVSGRGYKEYRTVDFSTWLNGFVGGKRWVGIRSCLAEANVCDDLSDGRVSQIADAFYHKNLSPIQSGCCKPPSDCNFEFRNATFWIPPSKNETAVAENGDCGTWSNVQTELCFNCNACKAGVLANIREKWRNLLVFNICLLILLITVYSCGCCARRNNRTARKSDSV

SEQ ID NO: 33902 - protein, 264 aa, Arabidopsis thaliana
  misc_feature (1)..(264): Ceres Seq. ID no. 13604469
MVGLANTLVMLVGASAIGYSIYMFVHQGVTDCESAIRIPLLTTGLILFLVSLLGVIGSCFKENLAMVSYLIILFGGIVALMIFSIFLFFVTNKGAGRVVSGRGYKEYRTVDFSTWLNGFVGGKRWVGIRSCLAEANVCDDLSDGRVSQIADAFYHKNLSPIQSGCCKPPSDCNFEFRNATFWIPPSKNETAVAENGDCGTWSNVQTELCFNCNACKAGVLANIREKWRNLLVFNICLLILLITVYSCGCCARRNNRTARKSDSV

SEQ ID NO: 33903 - protein, 255 aa, Arabidopsis thaliana
  misc_feature (1)..(255): Ceres Seq. ID no. 13604470
MLVGASAIGYSIYMFVHQGVTDCESAIRIPLLTTGLILFLVSLLGVIGSCFKENLAMVSYLIILFGGIVALMIFSIFLFFVTNKGAGRVVSGRGYKEYRTVDFSTWLNGFVGGKRWVGIRSCLAEANVCDDLSDGRVSQIADAFYHKNLSPIQSGCCKPPSDCNFEFRNATFWIPPSKNETAVAENGDCGTWSNVQTELCFNCNACKAGVLANIREKWRNLLVFNICLLILLITVYSCGCCARRNNRTARKSDSV

SEQ ID NO: 33904 - DNA, 1399 bp, Arabidopsis thaliana
  misc_feature (1)..(1399): Ceres Seq. ID no. 13604479
gcacgaggtaatcctaactatacaaaacacataacaatatggctccttcaacaaaagttctctctttacttctcttatatgtcgtcgtgtcattagcctccggtgatgagtccatcatcaacgaccatctccaacttccatcggacggcaagtggagaaccgatgaagaagtgaggtccatctacttacaatggtccgcagaacacgggaaaactaacaacaacaacaacggtatcatcaacgaccaagacaaaagattcaatattttcaaagacaacttaagattcatcgatttacacaacgaagacaacaagaacgctacttacaagcttggtctcaccaaatttaccgatctcactaacgatgagtaccgcaagttgtacctcggggcaagaactgagcccgcccgccgcatcgctaaggccaagaatgtcaaccagaaatactcagccgctgtaaacggcaaggaggttccagagacggttgattggagacagaaaggagccgttaaccccatcaaagaccaaggaacttgcggaagttgttgggcgttttcgactactgcagcagtagaaggtataaacaagatcgtaacaggagaactcatatctctatcagaacaagaacttgttgactgcgacaaatcctacaatcaaggttgcaacggcggtttaatggactacgcttttcaattcatcatgaaaaatggtggcttaaacactgagaaagattatccttaccgtggattcggcggaaaatgcaattctttcttgaagaattctagagttgtgagtattgatgggtacgaagatgttcctactaaagacgagactgcgttgaagaaagctatttcataccaaccggttagtgtagctattgaagccggtggaagaatttttcaacattaccaatcgggtatttttaccggaagttgtggtacaaatcttgatcacgcggtggttgctgtcgggtacggatcagagaacggtgttgactactggattgtaaggaactcttggggtccacgttggggtgaggaaggttacattagaatggagagaaacttggcagcctccaaatccggtaagtgtgggattgcggttgaagcctcgtacccggttaagtacagcccaaacccggttcgtggaaatactatcagcagtgtttgaaatcaagacgctcgataaacatttgggattcttataactgaatttaatctcgtattgttattattgtttgtatgtatagtatttcaacaacaatttcaaaaattagttgattcatcataaggatataaaatttataaatccttatgtcgatcaatttcttttttattcaaagaaagattgtttgcttgttttatgtattaagagaaatataataaaatgatatatttctt

SEQ ID NO: 33905 - protein, 376 aa, Arabidopsis thaliana
  misc_feature (1)..(376): Ceres Seq. ID no. 13604480
MAPSTKVLSLLLLYVVVSLASGDESIINDHLQLPSDGKWRTDEEVRSIYLQWSAEHGKTNNNNNGIINDQDKRFNIFKDNLRFIDLHNEDNKNATYKLGLTKFTDLTNDEYRKLYLGARTEPARRIAKAKNVNQKYSAAVNGKEVPETVDWRQKGAVNPIKDQGTCGSCWAFSTTAAVEGINKIVTGELISLSEQELVDCDKSYNQGCNGGLMDYAFQFIMKNGGLNTEKDYPYRGFGGKCNSFLKNSRVVSIDGYEDVPTKDETALKKAISYQPVSVAIEAGGRIFQHYQSGIFTGSCGTNLDHAVVAVGYGSENGVDYWIVRNSWGPRWGEEGYIRMERNLAASKSGKCGIAVEASYPVKYSPNPVRGNTISSV

SEQ ID NO: 33906 - DNA, 1336 bp, Arabidopsis thaliana
  misc_feature (1)..(1336): Ceres Seq. ID no. 13604493
agttttgatgataaaagccatggctctatcttctgccggcgtcgtctctcatcttcatcctccgtcgttttcttcgtcgtcaggattatccgtcaacagagttctgtttcggaatcggaacgctagtccttgtggtctatctcttccaattctcaatccgtctcggtctgtacttgtttttgctcgtggcaagaatcgaaaaggattcgtgtcttcgtcttcttcgtctccgaagaaaaacaaaaagaaaagtttggatggagctgataatggaggaggtgaggaggaggaggatccatttgaggcattgtttaatcttttagaagaagatttgaagaatgataactcggatgatgaggagataagtgaggaagagttagaggcattagccgatgagttagctcgagcattgggtgttggtgacgatgttgatgacatcgacttgtttggttcagtcactggtgatgttgatgttgatgttgataatgatgatgatgataatgatgatgatgataatgatgatgatgatgatgacagcgaagaagatgaaagaccgactaagctgaagaattggcagcttaaaagactggcttatgcattgaaagctgggcgtcgtaaaactagtattaaaaatctggcagctgaggtttgtcttgacagggcttatgttcttgaattgcttcgtgacccgcctccaaagctgctaatgctaagtgctacactaccagatgaaaaaccgccagtagcagcacctgagaactcctcacctgatccaagtcctgtggaatcattatcagctgaagatgttgtggtcgaacctaaggaaaaagtaaaagatgaagcagttcatgtgatgcaacagagatggtctgctcagaaaagagtgaagaaagctcacattgaaacgctagagaaagtttacagaagatcaaaacgacccactaatgctgtggttagcagcattgttcaagtgaccaatcttccaaggaagcgagttttgaagtggttcgaagataaaagagcagaagacggagttccagataagcgagctccatatcaagctccggtttgatctaatgttaacgttgagatggcaatgatttgtatacttgattctcagaaactcatcaacattgtcgtcaaggacaagtttttttggtgatacgaggagtgtttatagtagtagattctgtccaatggtgtggctggatatgttggactatgaaattttaggatatcttgtattcagtttttagttatttccttgctgagattgtgtcttgtagaaaaccgtttcaactttgtttggtttatggcggctataaagtttaatttt

SEQ ID NO: 33907 - protein, 356 aa, Arabidopsis thaliana
  misc_feature (1)..(356): Ceres Seq. ID no. 13604494
VLMIKAMALSSAGVVSHLHPPSFSSSSGLSVNRVLFRNRNASPCGLSLPILNPSRSVLVFARGKNRKGFVSSSSSSPKKNKKKSLDGADNGGGEEEEDPFEALFNLLEEDLKNDNSDDEEISEEELEALADELARALGVGDDVDDIDLFGSVTGDVDVDVDNDDDDNDDDDNDDDDDDSEEDERPTKLKNWQLKRLAYALKAGRRKTSIKNLAAEVCLDRAYVLELLRDPPPKLLMLSATLPDEKPPVAAPENSSPDPSPVESLSAEDVVVEPKEKVKDEAVHVMQQRWSAQKRVKKAHIETLEKVYRRSKRPTNAVVSSIVQVTNLPRKRVLKWFEDKRAEDGVPDKRAPYQAPV

SEQ ID NO: 33908 - protein, 354 aa, Arabidopsis thaliana
  misc_feature (1)..(354): Ceres Seq. ID no. 13604495
MIKAMALSSAGVVSHLHPPSFSSSSGLSVNRVLFRNRNASPCGLSLPILNPSRSVLVFARGKNRKGFVSSSSSSPKKNKKKSLDGADNGGGEEEEDPFEALFNLLEEDLKNDNSDDEEISEEELEALADELARALGVGDDVDDIDLFGSVTGDVDVDVDNDDDDNDDDDNDDDDDDSEEDERPTKLKNWQLKRLAYALKAGRRKTSIKNLAAEVCLDRAYVLELLRDPPPKLLMLSATLPDEKPPVAAPENSSPDPSPVESLSAEDVVVEPKEKVKDEAVHVMQQRWSAQKRVKKAHIETLEKVYRRSKRPTNAVVSSIVQVTNLPRKRVLKWFEDKRAEDGVPDKRAPYQAPV

SEQ ID NO: 33909 - protein, 350 aa, Arabidopsis thaliana
  misc_feature (1)..(350): Ceres Seq. ID no. 13604496
MALSSAGVVSHLHPPSFSSSSGLSVNRVLFRNRNASPCGLSLPILNPSRSVLVFARGKNRKGFVSSSSSSPKKNKKKSLDGADNGGGEEEEDPFEALFNLLEEDLKNDNSDDEEISEEELEALADELARALGVGDDVDDIDLFGSVTGDVDVDVDNDDDDNDDDDNDDDDDDSEEDERPTKLKNWQLKRLAYALKAGRRKTSIKNLAAEVCLDRAYVLELLRDPPPKLLMLSATLPDEKPPVAAPENSSPDPSPVESLSAEDVVVEPKEKVKDEAVHVMQQRWSAQKRVKKAHIETLEKVYRRSKRPTNAVVSSIVQVTNLPRKRVLKWFEDKRAEDGVPDKRAPYQAPV

SEQ ID NO: 33910 - DNA, 2810 bp, Arabidopsis thaliana
  misc_feature (1)..(2810): Ceres Seq. ID no. 13604497
ggccgccaaatttatcaccccgtgcttctgatcacggtgggattctctccgatcggtgacatatcgtggttcatactccggtggatctcacggcgtaataatttatcatatctgaatcgcaatcttattaaccatggctcctccggccgcttcacagcgttatccgtcaccgtcccaaccttcagggaaaagcgaagtgtcagatctgaaaacccagcttcgccagctagctggaagcagagctccaggagttgatgattccaaacgtgacctctacaagaaagtaatatcgtacatgactattggcattgacgtctcatctgtatttggagagatggtcatgtgctcggcaacatcagacattgtcctgaagaagatgtgttatctttacgttggaaactatgcaaagggcaatcctgatctttctcttttgacgattaattttctgcaaagggattgcaaagatgaggaccctatgatccgtgggcttgcattgaggagcttgtgttctttacgagtgccaaaccttgtggagtatctggttggtcccttggggagcgggctcaaggacaataatagctatgttagaactatcgctgttactggagtactaaagctttatcacatctcaccctcaacatgcattgatgccgattttcctgcaacgttgaaaagtttgatgcttcatgattcagatgctcaggtagttgccaattgcctgtctgcacttcaagaaatttggagtttagaagcaagccactctgaggaagcatgccgggaaaaggagtccttgctcagcaagccagttatatattatttcttgaatcggatcaaggaattcaatgaatgggcacaatgtcttatacttgagttggcagtaaaatatgtgccgtcagatagtaatgatatttttgacattatgaatctgttggaagacagactgcagcatgccaatggagctgttgtcttggcaacagtcaaagtgtttttacaattaactctctccatgactgatgttcatcaacaggtatatgagcgtattaaatccccacttctaactcttgtcagttctggaagtccagagcaatcgtatgcaatcttgagccaccttcatcttttggttgttcgtgcgccattcatctttgctgcagactataagcatttctactgccagtacaatgaaccatcatatgtcaaaaagttgaagcttgagatgttgactgctgttgcaaacgagagcaacacttacgaaatcgtgacggaactgtgtgagtatgctgcaaacgttgatattgcaattgcgagagagtcaattcgagcagttggaaagattgctttgcaacagtatgatgtaaatgcgattgttgatagacttcttcaatttctggagatggaaaaggactatgtgaccgctgaaactttggttcttgtaaaggaccttctaaggaagtatccacaatggagccatgactgcatttctgttgttgggggtatcagcagcaaaaatatccaggaaccgaaagccaaggcggctcttatatggatgttgggtgagtatgcacaggacatgagtgatgctccttatgttttggagaatctgatagaaaactgggaggaagagcattcagccgaggttcggttacatctcttaactgcggcaatgaaatgctttttcaagagggcacctgagactcagaaagccctaggaacagctctagctgcaggcattgctgattttcaccaggatgttcatgaccgagccttgttctactatcgggttctgcaatacgatgtacacgtggcagaacgtgttgttagtcctccaaaacaggcggtttcagtctttgctgacactcaaagcagtgaaatcaaagaccgtgtatttgacgagtttaacagcctttctgtgatataccagaagccatcttacatgtttacggataaggaacaccgaggaccctttgagttttctgacgaagttggaaatatttccatcacacctgaagcctccagcgacattgttccagctcagcaatatgaggcaaatgacaaggacctgcttctaggtattgacgagaaggatgaaaataaaggagtttccaataacaatggttctgcttacacggccccttcattagaaagctcctctaatataacctcacaaatgcaagagcttgcaatctccggccctgccacatccgcaactaccccacaatcatttggttttgatgatctctttggtttgggtttatcaaccgctcctgctccaacaccatcaccgcctcttttgaaacttaacgcaagagctgctttagatccaggcgccttccaacaaaaatggcgccaattgccaatatcactaacacaggagtgttctgtgaatccccagggaatcgcggccttaacagttccacaatcacttatcaaacacatgcagagtcattccattcactgtatcgcatcgggcggtcaatctccaaacttcaagttcttctttttcgctcaaaaggaatcagaaccatcgaactatctcactgagtgtatcataaacacttcatcagccaaagctcagataaaagtgaaagcagacgagcagagtacgtgtcaagcattcacaaccgtatttgaaacagccttgtccaaatttggtatgccttgaaaagcattcaatcaatagaattctctggatggatctctacacttgttgtaaaatgcgatgatactttttcgagttttgtagtttctctcacctttgatttcgtttcgttgtgttactaagatagtttgtttgaggtgttatgaagcggccg

SEQ ID NO: 33911 - protein, 841 aa, Arabidopsis thaliana
  misc_feature (1)..(841): Ceres Seq. ID no. 13604498
MAPPAASQRYPSPSQPSGKSEVSDLKTQLRQLAGSRAPGVDDSKRDLYKKVISYMTIGIDVSSVFGEMVMCSATSDIVLKKMCYLYVGNYAKGNPDLSLLTINFLQRDCKDEDPMIRGLALRSLCSLRVPNLVEYLVGPLGSGLKDNNSYVRTIAVTGVLKLYHISPSTCIDADFPATLKSLMLHDSDAQVVANCLSALQEIWSLEASHSEEACREKESLLSKPVIYYFLNRIKEFNEWAQCLILELAVKYVPSDSNDIFDIMNLLEDRLQHANGAVVLATVKVFLQLTLSMTDVHQQVYERIKSPLLTLVSSGSPEQSYAILSHLHLLVVRAPFIFAADYKHFYCQYNEPSYVKKLKLEMLTAVANESNTYEIVTELCEYAANVDIAIARESIRAVGKIALQQYDVNAIVDRLLQFLEMEKDYVTAETLVLVKDLLRKYPQWSHDCISVVGGISSKNIQEPKAKAALIWMLGEYAQDMSDAPYVLENLIENWEEEHSAEVRLHLLTAAMKCFFKRAPETQKALGTALAAGIADFHQDVHDRALFYYRVLQYDVHVAERVVSPPKQAVSVFADTQSSEIKDRVFDEFNSLSVIYQKPSYMFTDKEHRGPFEFSDEVGNISITPEASSDIVPAQQYEANDKDLLLGIDEKDENKGVSNNNGSAYTAPSLESSSNITSQMQELAISGPATSATTPQSFGFDDLFGLGLSTAPAPTPSPPLLKLNARAALDPGAFQQKWRQLPISLTQECSVNPQGIAALTVPQSLIKHMQSHSIHCIASGGQSPNFKFFFFAQKESEPSNYLTECIINTSSAKAQIKVKADEQSTCQAFTTVFETALSKFGMP

SEQ ID NO: 33912 - protein, 787 aa, Arabidopsis thaliana
  misc_feature (1)..(787): Ceres Seq. ID no. 13604499
MTIGIDVSSVFGEMVMCSATSDIVLKKMCYLYVGNYAKGNPDLSLLTINFLQRDCKDEDPMIRGLALRSLCSLRVPNLVEYLVGPLGSGLKDNNSYVRTIAVTGVLKLYHISPSTCIDADFPATLKSLMLHDSDAQVVANCLSALQEIWSLEASHSEEACREKESLLSKPVIYYFLNRIKEFNEWAQCLILELAVKYVPSDSNDIFDIMNLLEDRLQHANGAVVLATVKVFLQLTLSMTDVHQQVYERIKSPLLTLVSSGSPEQSYAILSHLHLLVVRAPFIFAADYKHFYCQYNEPSYVKKLKLEMLTAVANESNTYEIVTELCEYAANVDIAIARESIRAVGKIALQQYDVNAIVDRLLQFLEMEKDYVTAETLVLVKDLLRKYPQWSHDCISVVGGISSKNIQEPKAKAALIWMLGEYAQDMSDAPYVLENLIENWEEEHSAEVRLHLLTAAMKCFFKRAPETQKALGTALAAGIADFHQDVHDRALFYYRVLQYDVHVAERVVSPPKQAVSVFADTQSSEIKDRVFDEFNSLSVIYQKPSYMFTDKEHRGPFEFSDEVGNISITPEASSDIVPAQQYEANDKDLLLGIDEKDENKGVSNNNGSAYTAPSLESSSNITSQMQELAISGPATSATTPQSFGFDDLFGLGLSTAPAPTPSPPLLKLNARAALDPGAFQQKWRQLPISLTQECSVNPQGIAALTVPQSLIKHMQSHSIHCIASGGQSPNFKFFFFAQKESEPSNYLTECIINTSSAKAQIKVKADEQSTCQAFTTVFETALSKFGMP

SEQ ID NO: 33913 - protein, 774 aa, Arabidopsis thaliana
  misc_feature (1)..(774): Ceres Seq. ID no. 13604500
MVMCSATSDIVLKKMCYLYVGNYAKGNPDLSLLTINFLQRDCKDEDPMIRGLALRSLCSLRVPNLVEYLVGPLGSGLKDNNSYVRTIAVTGVLKLYHISPSTCIDADFPATLKSLMLHDSDAQVVANCLSALQEIWSLEASHSEEACREKESLLSKPVIYYFLNRIKEFNEWAQCLILELAVKYVPSDSNDIFDIMNLLEDRLQHANGAVVLATVKVFLQLTLSMTDVHQQVYERIKSPLLTLVSSGSPEQSYAILSHLHLLVVRAPFIFAADYKHFYCQYNEPSYVKKLKLEMLTAVANESNTYEIVTELCEYAANVDIAIARESIRAVGKIALQQYDVNAIVDRLLQFLEMEKDYVTAETLVLVKDLLRKYPQWSHDCISVVGGISSKNIQEPKAKAALIWMLGEYAQDMSDAPYVLENLIENWEEEHSAEVRLHLLTAAMKCFFKRAPETQKALGTALAAGIADFHQDVHDRALFYYRVLQYDVHVAERVVSPPKQAVSVFADTQSSEIKDRVFDEFNSLSVIYQKPSYMFTDKEHRGPFEFSDEVGNISITPEASSDIVPAQQYEANDKDLLLGIDEKDENKGVSNNNGSAYTAPSLESSSNITSQMQELAISGPATSATTPQSFGFDDLFGLGLSTAPAPTPSPPLLKLNARAALDPGAFQQKWRQLPISLTQECSVNPQGIAALTVPQSLIKHMQSHSIHCIASGGQSPNFKFFFFAQKESEPSNYLTECIINTSSAKAQIKVKADEQSTCQAFTTVFETALSKFGMP

SEQ ID NO: 33914 - DNA, 3498 bp, Arabidopsis thaliana
  misc_feature (1)..(3498): Ceres Seq. ID no. 13604537
atgaatactggtggtcggctcatcgctggttctcacaataggaatgagttcgtgttgattaatgcagacgagagtgccagaattagatcagtggaagaactaagtggacaaacatgtcaaatctgtggagatgagattgagctaagtgttgatggagagtcttttgtggcatgtaatgaatgtgctttccctgtctgtagaccttgctatgagtatgagagacgagaaggaaaccaatcttgtcctcagtgcaaaactcgttacaagcgcatcaaaggaagtccaagggttgaaggagatgaggaggatgatggaattgatgatcttgattttgagtttgattatagtaggagtggccttgaatctgaaactttctctcgccgcaactcggagtttgatttggcctctgctccacctggctcacagattcctttgttaacttatggagaggaggacgttgaaatttcttctgatagtcatgctctcattgtttctccatcacctggccatatccatagggttcatcaacctcattttcctgaccccgctgcacatccaagaccaatggtacctcagaaagaccttgcggtctatggatatggaagtgttgcgtggaaggatcgtatggaggagtggaagagaaagcagaacgaaaaatatcaggtggttaaacatgatggagattctagtcttggagacggagatgatgctgatattcctatgatggatgagggaaggcagcctttgtctaggaaagtaccgataaagtcgagcaaaataaatccgtacaggatgctaattgttctgcgtcttgtgattctcggtctctttttccattaccgtattcttcaccccgtcaatgatgcttacgccttgtggctaatatctgtgatatgcgaaatatggtttgcggtttcatgggttcttgatcagttccctaaatggtatcctatagaaagagagacatacttggacaggctctcattgaggtacgaaaaagaagggaaaccatctgaactagctggtgttgatgtttttgtgagtacagtggatccgatgaaagagcctccgcttattacagcaaacactgttctgtctattcttgcggttgattatccggtagacagagttgcctgttatgtttctgatgatggtgctgctatgcttacttttgaagccctttcagaaacagcagagtttgctaggaaatgggttcctttctgtaagaaatacactatcgagccacgagctcccgaatggtatttttgccacaagatggattatttaaagaataaagttcaccctgcatttgttagggaacgccgagccatgaagagagattatgaagaattcaaggttaagatcaatgctttagttgcgactgcacagaaagtgcctgaagaaggttggactatgcaagacggtactccttggcccggtaataacgtgcgagatcaccctggcatgatccaggtattccttggaaataacggtgtccgcgatgtagaaaacaacgagttgcctcggctggtttatgtttctcgtgagaagagacccggatttgaccatcacaagaaggctggagccatgaactccctgatacgagtctctggagttctatcaaatgctccttatcttctaaatgtcgattgtgatcactacatcaataatagcaaagctcttagagaagcaatgtgtttcatgatggatcctcagtcgggaaagaaaatttgttatgttcaattccctcaaagattcgatgggattgataaaagtgacagatactctaatcgtaatgttgtattcttcgatattaatatgaaaggtttggatggattacaagggcctatatacgtgggaaccgggtgtgtttttaggagacaagcactttatggatttgatgcgccaaaaaagaagaagactaagcgtatgacttgcaattgctggcctaagtggtgtttgttttgttgtggtctaagaaagaatcgtaagtcaaagacaacggataagaaaaagaagaacagggaagcctcaaagcagatacacgcgctagaaaatatcgaagagggcaccaaaggcactaatgatgcggcgaaatcaccagaggcggcacaattgaagttggagaagaagtttggacagtctcctgtttttgttgcgtctgctggtatggagaatggtgggcttgctaggaatgcgagtccagcttctctgcttagagaagccatccaagtcattagttgtggatacgaagataaaaccgaatggggaaaagagattgggtggatctacggttctgtcaccgaggatatccttacgggtttcaagatgcattctcatggctggagatcggtttactgtacacctaagataccggcctttaaaggatcagcacctatcaatctttctgaccgtcttcatcaagttcttcggtgggcgctcgggtctgttgagattttcttgagcagacattgtcctatttggtatggttatggaggtggtttgaaatggcttgagagattgtcttacatcaactctgtggtttatccatggacctctattccactccttgtttactgttctctcccagctatctgtcttctcaccggaaaattcatcgtccctgagattagcaactatgcaagtatcctcttcatggcacttttcgggtcgattgctgtaacgggcattctcgagatgcaatggggtaaagtagggatcgatgattggtggagaaacgaacagttttgggtgattggaggtgtttcagctcatctctttgctctcttccaaggtctcctaaaggttttagccggtgttgagacaaacttcacagttacatctaaagcagcagatgatggtgaattctctgagctttacatcttcaaatggacatcactcttgatccctccaaccacactactcatcataaacgtaatcggagtcattgtgggaatatctgatgcgatcagtaacggatatgactcgtggggtcctcttttcggaagattgttctttgccttttgggtcatcctccatctatatcctttccttaaaggtctgcttgggaaacaagacagaatgcctacaatcattcttgtctggtcgatccttctcgcctctatccttacgcttctttgggtacgagtcaatccgtttgtggcgaaaggcggtcctatcctcgagatatgtggcttggactgcctttgattgaactcaagagttgatatgatacgtaacagattttccacagaggtaagtaaagaggaaagtgtcgctcacacatttgtttgtttactgtgttaagatccttgttagattgaacacaaaaagaaaagaaggatttagatatataatgttattcttttggaaggtgttgtaatgtagatatagaagaaggtggtgtcgtctatttattcttgttatttttttttgagtgaaagtgaaacagaaaagagaggtgttatcttattaattctttcattgaaatattttgag

SEQ ID NO: 33915 - protein, 1069 aa, Arabidopsis thaliana
  misc_feature (1)..(1069): Ceres Seq. ID no. 13604538
MNTGGRLIAGSHNRNEFVLINADESARIRSVEELSGQTCQICGDEIELSVDGESFVACNECAFPVCRPCYEYERREGNQSCPQCKTRYKRIKGSPRVEGDEEDDGIDDLDFEFDYSRSGLESETFSRRNSEFDLASAPPGSQIPLLTYGEEDVEISSDSHALIVSPSPGHIHRVHQPHFPDPAAHPRPMVPQKDLAVYGYGSVAWKDRMEEWKRKQNEKYQVVKHDGDSSLGDGDDADIPMMDEGRQPLSRKVPIKSSKINPYRMLIVLRLVILGLFFHYRILHPVNDAYALWLISVICEIWFAVSWVLDQFPKWYPIERETYLDRLSLRYEKEGKPSELAGVDVFVSTVDPMKEPPLITANTVLSILAVDYPVDRVACYVSDDGAAMLTFEALSETAEFARKWVPFCKKYTIEPRAPEWYFCHKMDYLKNKVHPAFVRERRAMKRDYEEFKVKINALVATAQKVPEEGWTMQDGTPWPGNNVRDHPGMIQVFLGNNGVRDVENNELPRLVYVSREKRPGFDHHKKAGAMNSLIRVSGVLSNAPYLLNVDCDHYINNSKALREAMCFMMDPQSGKKICYVQFPQRFDGIDKSDRYSNRNVVFFDINMKGLDGLQGPIYVGTGCVFRRQALYGFDAPKKKKTKRMTCNCWPKWCLFCCGLRKNRKSKTTDKKKKNREASKQIHALENIEEGTKGTNDAAKSPEAAQLKLEKKFGQSPVFVASAGMENGGLARNASPASLLREAIQVISCGYEDKTEWGKEIGWIYGSVTEDILTGFKMHSHGWRSVYCTPKIPAFKGSAPINLSDRLHQVLRWALGSVEIFLSRHCPIWYGYGGGLKWLERLSYINSVVYPWTSIPLLVYCSLPAICLLTGKFIVPEISNYASILFMALFGSIAVTGILEMQWGKVGIDDWWRNEQFWVIGGVSAHLFALFQGLLKVLAGVETNFTVTSKAADDGEFSELYIFKWTSLLIPPTTLLIINVIGVIVGISDAISNGYDSWGPLFGRLFFAFWVILHLYPFLKGLLGKQDRMPTIILVWSILLASILTLLWVRVNPFVAKGGPILEICGLDCL

SEQ ID NO: 33916 - protein, 881 aa, Arabidopsis thaliana
  misc_feature (1)..(881): Ceres Seq. ID no. 13604539
MVPQKDLAVYGYGSVAWKDRMEEWKRKQNEKYQVVKHDGDSSLGDGDDADIPMMDEGRQPLSRKVPIKSSKINPYRMLIVLRLVILGLFFHYRILHPVNDAYALWLISVICEIWFAVSWVLDQFPKWYPIERETYLDRLSLRYEKEGKPSELAGVDVFVSTVDPMKEPPLITANTVLSILAVDYPVDRVACYVSDDGAAMLTFEALSETAEFARKWVPFCKKYTIEPRAPEWYFCHKMDYLKNKVHPAFVRERRAMKRDYEEFKVKINALVATAQKVPEEGWTMQDGTPWPGNNVRDHPGMIQVFLGNNGVRDVENNELPRLVYVSREKRPGFDHHKKAGAMNSLIRVSGVLSNAPYLLNVDCDHYINNSKALREAMCFMMDPQSGKKICYVQFPQRFDGIDKSDRYSNRNVVFFDINMKGLDGLQGPIYVGTGCVFRRQALYGFDAPKKKKTKRMTCNCWPKWCLFCCGLRKNRKSKTTDKKKKNREASKQIHALENIEEGTKGTNDAAKSPEAAQLKLEKKFGQSPVFVASAGMENGGLARNASPASLLREAIQVISCGYEDKTEWGKEIGWIYGSVTEDILTGFKMHSHGWRSVYCTPKIPAFKGSAPINLSDRLHQVLRWALGSVEIFLSRHCPIWYGYGGGLKWLERLSYINSVVYPWTSIPLLVYCSLPAICLLTGKFIVPEISNYASILFMALFGSIAVTGILEMQWGKVGIDDWWRNEQFWVIGGVSAHLFALFQGLLKVLAGVETNFTVTSKAADDGEFSELYIFKWTSLLIPPTTLLIINVIGVIVGISDAISNGYDSWGPLFGRLFFAFWVILHLYPFLKGLLGKQDRMPTIILVWSILLASILTLLWVRVNPFVAKGGPILEICGLDCL

SEQ ID NO: 33917 - protein, 861 aa, Arabidopsis thaliana
  misc_feature (1)..(861): Ceres Seq. ID no. 13604540
MEEWKRKQNEKYQVVKHDGDSSLGDGDDADIPMMDEGRQPLSRKVPIKSSKINPYRMLIVLRLVILGLFFHYRILHPVNDAYALWLISVICEIWFAVSWVLDQFPKWYPIERETYLDRLSLRYEKEGKPSELAGVDVFVSTVDPMKEPPLITANTVLSILAVDYPVDRVACYVSDDGAAMLTFEALSETAEFARKWVPFCKKYTIEPRAPEWYFCHKMDYLKNKVHPAFVRERRAMKRDYEEFKVKINALVATAQKVPEEGWTMQDGTPWPGNNVRDHPGMIQVFLGNNGVRDVENNELPRLVYVSREKRPGFDHHKKAGAMNSLIRVSGVLSNAPYLLNVDCDHYINNSKALREAMCFMMDPQSGKKICYVQFPQRFDGIDKSDRYSNRNVVFFDINMKGLDGLQGPIYVGTGCVFRRQALYGFDAPKKKKTKRMTCNCWPKWCLFCCGLRKNRKSKTTDKKKKNREASKQIHALENIEEGTKGTNDAAKSPEAAQLKLEKKFGQSPVFVASAGMENGGLARNASPASLLREAIQVISCGYEDKTEWGKEIGWIYGSVTEDILTGFKMHSHGWRSVYCTPKIPAFKGSAPINLSDRLHQVLRWALGSVEIFLSRHCPIWYGYGGGLKWLERLSYINSVVYPWTSIPLLVYCSLPAICLLTGKFIVPEISNYASILFMALFGSIAVTGILEMQWGKVGIDDWWRNEQFWVIGGVSAHLFALFQGLLKVLAGVETNFTVTSKAADDGEFSELYIFKWTSLLIPPTTLLIINVIGVIVGISDAISNGYDSWGPLFGRLFFAFWVILHLYPFLKGLLGKQDRMPTIILVWSILLASILTLLWVRVNPFVAKGGPILEICGLDCL

SEQ ID NO: 33918 - DNA, 1099 bp, Arabidopsis thaliana
  misc_feature (1)..(1099): Ceres Seq. ID no. 13604547
caatagaggcaaggaggagaaagccaatggcacatgccacgtttacgtcggaagggcagaatatggagtcgtttcgactcttgagtggccacaaaatcccagccgttggactcggcacgtggcgatctgggtctcaagccgcccacgccgttgtcactgcaatcgtcgagggtggctataggcacatagatacagcttgggagtatggtgatcagagagaggtcggtcaaggaataaagagggcgatgcacgctggccttgaaaggagggacctctttgtgacctcgaagctttggtgcactgagttatctcctgagagagtgcgtcctgctctgcaaaacacccttaaagagcttcaattagagtaccttgatctctacttgattcactggcctatccggctaagagaaggagccagtaagccaccaaaggcaggggacgttcttgactttgacatggaaggagtttggagagaaatggagaatctttccaaggacagtctcgtcaggaatatcggtgtctgtaactttacagtcactaagctcaataagctgctaggatttgctgaactgatccctgccgtttgccagatggaaatgcatcctggttggagaaacgataggatactcgaattctgcaagaagaatgagatccatgttactgcctattctccattgggatctcaagaaggcgggagagatctgatacacgatcagacggtggataggatagcgaagaagctgaataagacaccgggacagattctagtgaaatggggtttgcagagaggaacaagtgtcatccctaagtcattgaatccagagaggatcaaagagaacatcaaagtgtttgattgggtgatccctgaacaagacttccaagctctcaacagcatcactgaccagaaacgagtgatagacggtgaggatcttttcgtcaacaagaccgaaggtccattccgtagtgtggctgatctatgggaccatgaagactaaaccgaacccgagaatcaaacataactatgtaaggaatgtgtttgttgtaacttgtaagatatcaaatgtacattttctgaaaataaaagaaagcagtctcccgt

SEQ ID NO: 33919 - protein, 330 aa, Arabidopsis thaliana
  misc_feature (1)..(330): Ceres Seq. ID no. 13604548
IEARRRKPMAHATFTSEGQNMESFRLLSGHKIPAVGLGTWRSGSQAAHAVVTAIVEGGYRHIDTAWEYGDQREVGQGIKRAMHAGLERRDLFVTSKLWCTELSPERVRPALQNTLKELQLEYLDLYLIHWPIRLREGASKPPKAGDVLDFDMEGVWREMENLSKDSLVRNIGVCNFTVTKLNKLLGFAELIPAVCQMEMHPGWRNDRILEFCKKNEIHVTAYSPLGSQEGGRDLIHDQTVDRIAKKLNKTPGQILVKWGLQRGTSVIPKSLNPERIKENIKVFDWVIPEQDFQALNSITDQKRVIDGEDLFVNKTEGPFRSVADLWDHED

SEQ ID NO: 33920 - protein, 322 aa, Arabidopsis thaliana
  misc_feature (1)..(322): Ceres Seq. ID no. 13604549
MAHATFTSEGQNMESFRLLSGHKIPAVGLGTWRSGSQAAHAVVTAIVEGGYRHIDTAWEYGDQREVGQGIKRAMHAGLERRDLFVTSKLWCTELSPERVRPALQNTLKELQLEYLDLYLIHWPIRLREGASKPPKAGDVLDFDMEGVWREMENLSKDSLVRNIGVCNFTVTKLNKLLGFAELIPAVCQMEMHPGWRNDRILEFCKKNEIHVTAYSPLGSQEGGRDLIHDQTVDRIAKKLNKTPGQILVKWGLQRGTSVIPKSLNPERIKENIKVFDWVIPEQDFQALNSITDQKRVIDGEDLFVNKTEGPFRSVADLWDHED

SEQ ID NO: 33921 - protein, 310 aa, Arabidopsis thaliana
  misc_feature (1)..(310): Ceres Seq. ID no. 13604550
MESFRLLSGHKIPAVGLGTWRSGSQAAHAVVTAIVEGGYRHIDTAWEYGDQREVGQGIKRAMHAGLERRDLFVTSKLWCTELSPERVRPALQNTLKELQLEYLDLYLIHWPIRLREGASKPPKAGDVLDFDMEGVWREMENLSKDSLVRNIGVCNFTVTKLNKLLGFAELIPAVCQMEMHPGWRNDRILEFCKKNEIHVTAYSPLGSQEGGRDLIHDQTVDRIAKKLNKTPGQILVKWGLQRGTSVIPKSLNPERIKENIKVFDWVIPEQDFQALNSITDQKRVIDGEDLFVNKTEGPFRSVADLWDHED

SEQ ID NO: 33922 - DNA, 910 bp, Arabidopsis thaliana
  misc_feature (1)..(910): Ceres Seq. ID no. 13604551
cgaggcctcgtgcgaattcggcacgaggaataattataagtatttactcaaaaaaaaaacaaaaaaagatgaactcttgccaacaaaaggctatggagaagttgcttcacgggcatgggtgcgccaaccagctgctcatcatggaccagaccgagtcagactcgtccatggaaagggaggatttggccaagtccgtcctccattgtttctcagatgcgctctccatcttgatcgatactaatgaccaccaagacgatcaatccaataactcatctcctcaggactcttctcctgtgcttgagagctccaggaaaccacttcacaagaggggaagaaagacatctatggcagagagctcagactaccatagacacgaatcttcaaccccgatctaccacgacggcttcctctggaggaaatacggacaaaagcagatcaaagaatctgagtaccaaaggagttactacaagtgtgcctacaccaaggaccagaactgtgaagcaaagaagcaggttcaaaagatccaacacaatcctccattgtactcaaccacttacttcggccagcacatatgccagcttcatcaagcttatgcaactttccccattgacacatctgacttcgaagagcacgagggatcccacatgatccgattcggtcaccccaacatcagcttctcctcctccacctctaacctccgccaacatcagaatcatcaggatcgcatcaaagatgaatacatgaaaccggtgatagcagaagattggtctccatcccagtggatgtcgtccgaggttgccctcgccgtggaggctttcgagtttaatcctttctggacatctcacgacttatcatcatgacactatatccctcagctctatcatcatacatatatagcttctttaatcct

SEQ ID NO: 33923 - protein, 285 aa, Arabidopsis thaliana
  misc_feature (1)..(285): Ceres Seq. ID no. 13604552
RPRANSARGIIISIYSKKKQKKMNSCQQKAMEKLLHGHGCANQLLIMDQTESDSSMEREDLAKSVLHCFSDALSILIDTNDHQDDQSNNSSPQDSSPVLESSRKPLHKRGRKTSMAESSDYHRHESSTPIYHDGFLWRKYGQKQIKESEYQRSYYKCAYTKDQNCEAKKQVQKIQHNPPLYSTTYFGQHICQLHQAYATFPIDTSDFEEHEGSHMIRFGHPNISFSSSTSNLRQHQNHQDRIKDEYMKPVIAEDWSPSQWMSSEVALAVEAFEFNPFWTSHDLSS

SEQ ID NO: 33924 - protein, 263 aa, Arabidopsis thaliana
  misc_feature (1)..(263): Ceres Seq. ID no. 13604553
MNSCQQKAMEKLLHGHGCANQLLIMDQTESDSSMEREDLAKSVLHCFSDALSILIDTNDHQDDQSNNSSPQDSSPVLESSRKPLHKRGRKTSMAESSDYHRHESSTPIYHDGFLWRKYGQKQIKESEYQRSYYKCAYTKDQNCEAKKQVQKIQHNPPLYSTTYFGQHICQLHQAYATFPIDTSDFEEHEGSHMIRFGHPNISFSSSTSNLRQHQNHQDRIKDEYMKPVIAEDWSPSQWMSSEVALAVEAFEFNPFWTSHDLSS

SEQ ID NO: 33925 - protein, 255 aa, Arabidopsis thaliana
  misc_feature (1)..(255): Ceres Seq. ID no. 13604554
MEKLLHGHGCANQLLIMDQTESDSSMEREDLAKSVLHCFSDALSILIDTNDHQDDQSNNSSPQDSSPVLESSRKPLHKRGRKTSMAESSDYHRHESSTPIYHDGFLWRKYGQKQIKESEYQRSYYKCAYTKDQNCEAKKQVQKIQHNPPLYSTTYFGQHICQLHQAYATFPIDTSDFEEHEGSHMIRFGHPNISFSSSTSNLRQHQNHQDRIKDEYMKPVIAEDWSPSQWMSSEVALAVEAFEFNPFWTSHDLSS

SEQ ID NO: 33926 - DNA, 2060 bp, Arabidopsis thaliana
  misc_feature (1)..(2060): Ceres Seq. ID no. 13604569
atgatccgatcacgaagtgtcttgttaattttcaggaaggtgttgtatcaatcgtcttgtcttaagtgtttattatgtgcaaactctttctctacttcagtttcgtcaagcttgggttttcgagcgacgaacaaagagttaaaccagatgataagatcggggtatatcgccgaagctagagatatttttgagaaactggaagcgaggaacacagtgacatggaatacgatgataagcgggtatgtgaaaaggcgtgaaatgaatcaagcacggaaactgttcgacgtaatgcctaagagagatgttgtgacttggaacacgatgatttcggggtatgtttcatgtggtgggattaggtttcttgaggaagcaaggaagctgtttgatgaaatgccttcaagggattctttttcatggaacactatgattagtggttatgcgaagaatcggaggataggtgaagcgttgttgttatttgagaaaatgcctgagagaaatgcagtgtcatggagtgctatgatcactgggttttgtcagaacggtgaagtggatagcgcggttgtgttgtttcggaaaatgcctgtgaaggattcgtctcctctatgtgcacttgtggctggtcttattaaaaacgagagactttcagaagctgcgtgggttttgggtcagtatgggagtttagtttcaggaagggaagatttggtgtatgcttataacactttgattgttggatatggacagagaggacaagtagaagcagctcgatgtctgtttgatcagattcctgatctctgtggtgatgatcatggtggagagtttagagagaggttctgtaaaaatgttgtgtcatggaattctatgatcaaagcttacttgaaagtgggtgatgtggtctctgcaaggttgctatttgatcagatgaaagaccgcgatacaatttcttggaacacaatgattgatggatacgtacatgtttccaggatggaagatgcttttgctctgttttcggaaatgccgaaccgtgatgcacattcgtggaacatgatggtctcgggttatgctagtgttggcaatgtagagcttgctcgccactactttgaaaaaacacctgagaaacatacagtctcgtggaactcgataatagcagcttatgagaaaaacaaggactacaaagaagctgttgatttgtttatccggatgaacattgaaggagagaagcctgacccacatactttaacttctcttctcagtgcatctaccgggcttgtgaatctgcgtttaggaatgcagatgcaccaaatcgttgtcaagactgtgatccccgatgttccagtccacaatgcccttatcactatgtattcaagatgcggtgaaataatggagtcgaggagaatcttcgatgaaatgaaactcaaaagagaagtaatcacatggaatgcaatgataggaggatatgcatttcatggtaatgcctcagaggccttgaatctgttcgggtcgatgaaaagcaacgggatatatccttctcacataacattcgtctcagttctgaacgcttgtgctcacgcgggacttgttgatgaggctaaagcacagtttgtgtccatgatgagtgtgtacaagatcgagccgcagatggaacattattcttccctggtcaacgttaccagtggacaagggcagtttgaagaggccatgtatatcataacgagtatgccttttgagccagacaaaacggtatggggtgcattattggatgcttgtaggatatataacaatgtagggcttgcacatgttgcagctgaagcaatgtcgagactcgaaccagagagctcaacaccttatgtactgttatataacatgtatgcggatatgggactatgggacgaagcttctcaagtgagaatgaacatggagagtaaaagaatcaagaaggaaagaggatccagttgggttgactcctcaacgtaaaaagcagcctttatttatgtttacttaaacataaaaattgatttgggatcagaattgagatagaaattgataaggtactcttgaaagtt

SEQ ID NO: 33927 - protein, 656 aa, Arabidopsis thaliana
  misc_feature (1)..(656): Ceres Seq. ID no. 13604570
MIRSRSVLLIFRKVLYQSSCLKCLLCANSFSTSVSSSLGFRATNKELNQMIRSGYIAEARDIFEKLEARNTVTWNTMISGYVKRREMNQARKLFDVMPKRDVVTWNTMISGYVSCGGIRFLEEARKLFDEMPSRDSFSWNTMISGYAKNRRIGEALLLFEKMPERNAVSWSAMITGFCQNGEVDSAVVLFRKMPVKDSSPLCALVAGLIKNERLSEAAWVLGQYGSLVSGREDLVYAYNTLIVGYGQRGQVEAARCLFDQIPDLCGDDHGGEFRERFCKNVVSWNSMIKAYLKVGDVVSARLLFDQMKDRDTISWNTMIDGYVHVSRMEDAFALFSEMPNRDAHSWNMMVSGYASVGNVELARHYFEKTPEKHTVSWNSIIAAYEKNKDYKEAVDLFIRMNIEGEKPDPHTLTSLLSASTGLVNLRLGMQMHQIVVKTVIPDVPVHNALITMYSRCGEIMESRRIFDEMKLKREVITWNAMIGGYAFHGNASEALNLFGSMKSNGIYPSHITFVSVLNACAHAGLVDEAKAQFVSMMSVYKIEPQMEHYSSLVNVTSGQGQFEEAMYIITSMPFEPDKTVWGALLDACRIYNNVGLAHVAAEAMSRLEPESSTPYVLLYNMYADMGLWDEASQVRMNMESKRIKKERGSSWVDSST

SEQ ID NO: 33928 - protein, 607 aa, Arabidopsis thaliana
  misc_feature (1)..(607): Ceres Seq. ID no. 13604571
MIRSGYIAEARDIFEKLEARNTVTWNTMISGYVKRREMNQARKLFDVMPKRDVVTWNTMISGYVSCGGIRFLEEARKLFDEMPSRDSFSWNTMISGYAKNRRIGEALLLFEKMPERNAVSWSAMITGFCQNGEVDSAVVLFRKMPVKDSSPLCALVAGLIKNERLSEAAWVLGQYGSLVSGREDLVYAYNTLIVGYGQRGQVEAARCLFDQIPDLCGDDHGGEFRERFCKNVVSWNSMIKAYLKVGDVVSARLLFDQMKDRDTISWNTMIDGYVHVSRMEDAFALFSEMPNRDAHSWNMMVSGYASVGNVELARHYFEKTPEKHTVSWNSIIAAYEKNKDYKEAVDLFIRMNIEGEKPDPHTLTSLLSASTGLVNLRLGMQMHQIVVKTVIPDVPVHNALITMYSRCGEIMESRRIFDEMKLKREVITWNAMIGGYAFHGNASEALNLFGSMKSNGIYPSHITFVSVLNACAHAGLVDEAKAQFVSMMSVYKIEPQMEHYSSLVNVTSGQGQFEEAMYIITSMPFEPDKTVWGALLDACRIYNNVGLAHVAAEAMSRLEPESSTPYVLLYNMYADMGLWDEASQVRMNMESKRIKKERGSSWVDSST

SEQ ID NO: 33929 - protein, 580 aa, Arabidopsis thaliana
  misc_feature (1)..(580): Ceres Seq. ID no. 13604572
MISGYVKRREMNQARKLFDVMPKRDVVTWNTMISGYVSCGGIRFLEEARKLFDEMPSRDSFSWNTMISGYAKNRRIGEALLLFEKMPERNAVSWSAMITGFCQNGEVDSAVVLFRKMPVKDSSPLCALVAGLIKNERLSEAAWVLGQYGSLVSGREDLVYAYNTLIVGYGQRGQVEAARCLFDQIPDLCGDDHGGEFRERFCKNVVSWNSMIKAYLKVGDVVSARLLFDQMKDRDTISWNTMIDGYVHVSRMEDAFALFSEMPNRDAHSWNMMVSGYASVGNVELARHYFEKTPEKHTVSWNSIIAAYEKNKDYKEAVDLFIRMNIEGEKPDPHTLTSLLSASTGLVNLRLGMQMHQIVVKTVIPDVPVHNALITMYSRCGEIMESRRIFDEMKLKREVITWNAMIGGYAFHGNASEALNLFGSMKSNGIYPSHITFVSVLNACAHAGLVDEAKAQFVSMMSVYKIEPQMEHYSSLVNVTSGQGQFEEAMYIITSMPFEPDKTVWGALLDACRIYNNVGLAHVAAEAMSRLEPESSTPYVLLYNMYADMGLWDEASQVRMNMESKRIKKERGSSWVDSST

SEQ ID NO: 33930 - DNA, 1762 bp, Arabidopsis thaliana
  misc_feature (1)..(1762): Ceres Seq. ID no. 13604577
caacataatgtccattacaaacaacaacagcatcataaatctcatcacgacgaactttcttctctttctccgtcgattcaatcctccacttcccgattccttcctccgccgccggagaaaccttcacaacctccgtctcaaacctaaccatctcctcaatcccaaactccttagcgaaatctttcaaatacgccaaaacttcgccatgactcggaaacctcctcggatctctagacacaccggaacgaaccacgaacgggaaatctctgtatccggtacactctcgtgtaccgttgattcgtagagatctatagacgcttgaatgaacaacggatcgggtcgggtcaacacttaacggatccgattcgacttcatcggtgtagatccaggttcctccgacttgtttttgtttctcgaaaacgaccaccgagtgaccttctcgtcgaagctctcgtgccgctactagacctgcaggtccagcaccgataaccgccacgtggtgtgatctggttggtgataatgcaggtgccatttgtgtgttctttgattagaatctatgaatcacaatcacacacagttgttacaatttatgattacaatgtttttaataatcaatttggtgtgttagaaacttacacgaatctgttattacagacgtagattgccacgttttggttgatagagagaaatgcttttattatataacttgtgtcattgtatttcttctccaccgagacagtgaaacatcaatcaatatgagcaatcatcaaactgtgagatttcttttctctcatttaccattttgcccttccactttcttgatgattgtttgttttttttgtggacagaagcaggtattgaagcaattggagccatggtgtgaacttaaagataaagtggttcttgtgacaggtgcttcatctggtatagggagagagatctgtcttgatctatgcaaagctggttgtaagattgtagcagcagctcgtcgtgttgatcgtctcaactctctctgttctgaaatcaacagctttggtgcaatcggagtccaagccgcagctcttgagctagacgtttcatcagacgcagacactattcgaaaagcggttaaagaagcttgggaaatctttggaacgatcgatgttttgattaacaatgctggaatcagaggcaatgtcaagtctagtttggatttatcaaaagaagaatgggacaaagtctttagaaccaacttgaccggatcttggttaatatccaaatacgtctgccttttgatgcgtgacgctaagcgtgggggctcggtgattaacgtctcgtcgatctctgggcttcatcgcggtttgttgcgcggtggactagcgtatgcttgttccaaaggtggtgttgacaccatgacgaggatgatggctattgagttagctgtttataagatcagagtgaactcgatcgcacctgggattttcaggtcagagatcacacaaggtcttttccagaaagagtggctcgagaaggtaacggaaaagattgtaccattaaagatgcaacagactgtggatccggggcttacatctctcgttcgctatctcattcacgattcttcccaatatgtcaccgggaatacatacatagtcgattccggagctacactccccggtgtgcccattttttcttctctttgaaaatcttagtcaaaatcttctgtgcttgtacatacaccgtgataagaatgatgtcttttccaataaatggcagtactggcatt

SEQ ID NO: 33931 - protein, 307 aa, Arabidopsis thaliana
  misc_feature (1)..(307): Ceres Seq. ID no. 13604578
MSNHQTVRFLFSHLPFCPSTFLMIVCFFCGQKQVLKQLEPWCELKDKVVLVTGASSGIGREICLDLCKAGCKIVAAARRVDRLNSLCSEINSFGAIGVQAAALELDVSSDADTIRKAVKEAWEIFGTIDVLINNAGIRGNVKSSLDLSKEEWDKVFRTNLTGSWLISKYVCLLMRDAKRGGSVINVSSISGLHRGLLRGGLAYACSKGGVDTMTRMMAIELAVYKIRVNSIAPGIFRSEITQGLFQKEWLEKVTEKIVPLKMQQTVDPGLTSLVRYLIHDSSQYVTGNTYIVDSGATLPGVPIFSSL

SEQ ID NO: 33932 - protein, 285 aa, Arabidopsis thaliana
  misc_feature (1)..(285): Ceres Seq. ID no. 13604579
MIVCFFCGQKQVLKQLEPWCELKDKVVLVTGASSGIGREICLDLCKAGCKIVAAARRVDRLNSLCSEINSFGAIGVQAAALELDVSSDADTIRKAVKEAWEIFGTIDVLINNAGIRGNVKSSLDLSKEEWDKVFRTNLTGSWLISKYVCLLMRDAKRGGSVINVSSISGLHRGLLRGGLAYACSKGGVDTMTRMMAIELAVYKIRVNSIAPGIFRSEITQGLFQKEWLEKVTEKIVPLKMQQTVDPGLTSLVRYLIHDSSQYVTGNTYIVDSGATLPGVPIFSSL

SEQ ID NO: 33933 - DNA, 998 bp, Arabidopsis thaliana
  misc_feature (1)..(998): Ceres Seq. ID no. 13604580
atttaaaacccttatttaaattatatagaaaaaaaaaaggtcaagtagtcttctattatttactagtataacctctagaaacatcatcaccacattcctggctaatatccttcatctagaacaattattaacgaatcaaaataccaaaaaacaaagcacctcattgactattaaattagtactaatacattaattaagttattattcctatatataaatctcacccattctccaccttatcatcacaatccaaaactctctctctctctctctctctgtctcttgtcttatcatttatctctctaacggcgaggcaatgggttttccggtgggatattctgagctacttctcccaaaaatctttttctacttgttatctttcttaggtttgatacgtaaactcatctccacaatgttcaagatcattggtctaccagatttcttagaacctgaaccggtttcaacctcatggcccgacccaccacccacgttgaccaaacctgactcagcagcaatactagccggagagatgttaccggttgttcgattctcggatataaaccgaccggaatccgagtgttgcgcagtgtgtctctacgatttcgagaacgacgacgagatccgacggctgacgaattgtcgacatatatttcatcggggatgtttggaccgttggatgatgggttataatcagatgacgtgtccactttgtcgtacacagtttatacctgatcatcttcaactggagtttaatcaaaggctctggtctcaatcttctgctgtttcttctcaacttcttgatgaatcatcatcttaggacgtattaaatctttgtccaaacaaaaaaaaaagacatattaaatcctttttttttggtactttcattgggaattgggtttggtgtgagatcgatgtaaatattaaacaaaaaaaaaaaggtagtggttacaggttaatgaaaaaagaaagaagaagaaaatttgtacttatccatccct

SEQ ID NO: 33934 - protein, 166 aa, Arabidopsis thaliana; identical to SEQ ID NO: 31439
  misc_feature (1)..(166): Ceres Seq. ID no. 13604581

SEQ ID NO: 33935 - protein, 134 aa, Arabidopsis thaliana; identical to SEQ ID NO: 31440
  misc_feature (1)..(134): Ceres Seq. ID no. 13604582

SEQ ID NO: 33936 - protein, 95 aa, Arabidopsis thaliana; identical to SEQ ID NO: 31441
  misc_feature (1)..(95): Ceres Seq. ID no. 13604583

SEQ ID NO: 33937 - DNA, 1143 bp, Arabidopsis thaliana
  misc_feature (1)..(1143): Ceres Seq. ID no. 13604584
aacacttcgctatttttcttcagtcgtcttcttcttccggcttctctcgaaacccttacctaaaaccctaatccgccacatccgtgttttagcctcacgacgaatcacgatgcaacgcagactcgtaaggttaaaaaaagagtatatctacaggaaaagcttggaaggtgatgagcgtaaggtctatgagcagaagcggctgataagagaagcccttcaagaaggaaagccgattcctactgagctccgaaacgtcgaagccaagcttcgacaagaaattgatcttgaagaccaaaacacagctgttccgcggagtcatatcgatgatgaatatgcaaatgctacggaagcagatccaaagattttgttgacaacttctaggaatccaagtgctccgctcatccgattcactaaggaattgaagtttgtgtttcctaactctcagagaataaatcgtggtagtcaggtcatttctgagatcattgaaactgctcgttcccatgattttactgatgttatattggttcatgagcaccgtggtgtgcctgatggtctcattatctctcatctcccatttggaccaactgcatactttggattacttaatgtggtaacaagacatgatatttcagacaagaaatccattggaaaaatgcctgagcaatatcctcatctcatttttaacaactttactactcagatgggtcaaagagttggaaacatcttaaaacatatcttccctgctccaaaactggatgcaaaacgtatagttactttttctaatcaatccgattatatatcattcaggaatcatgtctatgataaaggagagggaggtccaaaatcaatcgagcttaaagaaatcggtcctcgatttgagttgcggctctaccaggtgaaattaggaactgtggaacaaaatgaagcagagatcgaatgggttataagaccgtacatgaacacctctaaaaagcgcaagttcatcggtgaatgatgactaaacggaacagctttgaaccctttatctaaattctgttttacttatcattctgttggaagagctgttcagtttttgtgtccttagagaaaattgcgatgattttgttttaacgtttagcttataaaaacaaaactttcttgtct

SEQ ID NO: 33938 - protein, 330 aa, Arabidopsis thaliana
  misc_feature (1)..(330): Ceres Seq. ID no. 13604585
TLRYFSSVVFFFRLLSKPLPKTLIRHIRVLASRRITMQRRLVRLKKEYIYRKSLEGDERKVYEQKRLIREALQEGKPIPTELRNVEAKLRQEIDLEDQNTAVPRSHIDDEYANATEADPKILLTTSRNPSAPLIRFTKELKFVFPNSQRINRGSQVISEIIETARSHDFTDVILVHEHRGVPDGLIISHLPFGPTAYFGLLNVVTRHDISDKKSIGKMPEQYPHLIFNNFTTQMGQRVGNILKHIFPAPKLDAKRIVTFSNQSDYISFRNHVYDKGEGGPKSIELKEIGPRFELRLYQVKLGTVEQNEAEIEWVIRPYMNTSKKRKFIGE

SEQ ID NO: 33939 - protein, 294 aa, Arabidopsis thaliana
  misc_feature (1)..(294): Ceres Seq. ID no. 13604586
MQRRLVRLKKEYIYRKSLEGDERKVYEQKRLIREALQEGKPIPTELRNVEAKLRQEIDLEDQNTAVPRSHIDDEYANATEADPKILLTTSRNPSAPLIRFTKELKFVFPNSQRINRGSQVISEIIETARSHDFTDVILVHEHRGVPDGLIISHLPFGPTAYFGLLNVVTRHDISDKKSIGKMPEQYPHLIFNNFTTQMGQRVGNILKHIFPAPKLDAKRIVTFSNQSDYISFRNHVYDKGEGGPKSIELKEIGPRFELRLYQVKLGTVEQNEAEIEWVIRPYMNTSKKRKFIGE

SEQ ID NO: 33940 - DNA, 1024 bp, Arabidopsis thaliana
  misc_feature (1)..(1024): Ceres Seq. ID no. 13604587
agaaactgatttgataaaaaaaaatatcttcgttgaagtgagggtgacgagaagtttctgctttcatcaattaaaggtttacgcgtgaagcagatcatcagcaatggcggcgtcgcaagataagttggataagatgaaacttaggcaagattaccggaatttatggcactccgatctcatgggcaccgtcaccgccgacactccctattgctgcatctcgtgtctgtgtggaccttgtgtgtcatacatgcttcggagaagagcactttacaatgacatgtcaaggtatacttgctgtgctggatatatgccctgtagtggaaggtgtggagaaagcaaatgtcctcaactttgccttgccactgaggtcttcctttgcttcggaaactctgtggcctctacccgctttcttctgcaggatgaattcaacatccagacaacacaatgcgacaattgcataattggatttatgttctgcctcagccaagttgcttgcatattctctatagttgcttgcattgttggtagtgatgaactttccgaggcttctcagatactctcttgctgtgctgatatggtctactgcacggtctgcgcatgtatgcagacacaacacaaacttgagatggacaaaagagatggagtgtttggatcgcagccaatgggtgtgccaccagctcagcagatgtctcgttttgatcaacctgtccctcctccagtcggataccctcagtcctatccaccgcctgctcaaggctaccctcctgcatcttacccgcctcccggttatcctcagcattaagaaatttaaccagtatcttcattttatgtgtcaaagtgttgttgttacttggtttaggtgtgcagaactattatattgttcagctttgtcctctgcttatttctgcgatttatttattttgaggtattggtactctggttatgtctgaaaagcttttgctatcatcaactggtttgttgactttggtatttaagtaaagaaaaagaacaacatatgtattag

SEQ ID NO: 33941 - protein, 232 aa, Arabidopsis thaliana
  misc_feature (1)..(232): Ceres Seq. ID no. 13604588
MAASQDKLDKMKLRQDYRNLWHSDLMGTVTADTPYCCISCLCGPCVSYMLRRRALYNDMSRYTCCAGYMPCSGRCGESKCPQLCLATEVFLCFGNSVASTRFLLQDEFNIQTTQCDNCIIGFMFCLSQVACIFSIVACIVGSDELSEASQILSCCADMVYCTVCACMQTQHKLEMDKRDGVFGSQPMGVPPAQQMSRFDQPVPPPVGYPQSYPPPAQGYPPASYPPPGYPQH

SEQ ID NO: 33942 - protein, 222 aa, Arabidopsis thaliana
  misc_feature (1)..(222): Ceres Seq. ID no. 13604589
MKLRQDYRNLWHSDLMGTVTADTPYCCISCLCGPCVSYMLRRRALYNDMSRYTCCAGYMPCSGRCGESKCPQLCLATEVFLCFGNSVASTRFLLQDEFNIQTTQCDNCIIGFMFCLSQVACIFSIVACIVGSDELSEASQILSCCADMVYCTVCACMQTQHKLEMDKRDGVFGSQPMGVPPAQQMSRFDQPVPPPVGYPQSYPPPAQGYPPASYPPPGYPQH

SEQ ID NO: 33943 - protein, 207 aa, Arabidopsis thaliana
  misc_feature (1)..(207): Ceres Seq. ID no. 13604590
MGTVTADTPYCCISCLCGPCVSYMLRRRALYNDMSRYTCCAGYMPCSGRCGESKCPQLCLATEVFLCFGNSVASTRFLLQDEFNIQTTQCDNCIIGFMFCLSQVACIFSIVACIVGSDELSEASQILSCCADMVYCTVCACMQTQHKLEMDKRDGVFGSQPMGVPPAQQMSRFDQPVPPPVGYPQSYPPPAQGYPPASYPPPGYPQH

SEQ ID NO: 33944 - DNA, 593 bp, Arabidopsis thaliana
  misc_feature (1)..(593): Ceres Seq. ID no. 13604591
attgttgtgaatttctgtgagattgagaatgcaggcggaggagataatatgccgtgtttcagacgaagagatcatcgagaattacctgaggccaaagataaacggtgaaacatcttcaatcccgagatatgttgtggaattggcagaggagctgtacactgtagagccttggctgcttcctcgacaaacagctccaattctcaaccctggcgagtggttctactttgggaaacgcaatcgaaagtatagtaacttggaaggtgttcattgcgagggatcgtggatactcgaagacggttgcatcgcagtcctgtccaaggagacgggtgaggaaattggtggaacgacgagatttaggtattactataggaacaagggggataaagagagtcgtctgaagatgagcaattggtttatgagagagtatcgtctctattacaaatccaggagagtcttcaatggacgtcaggttttctgcattatcacttgtaatgatgaacattttatcgaataattctctctgcttttttttctaagataccatagtttaagatcctaattatgagtttgaatctataattataactctttgc

SEQ ID NO: 33945 - protein, 161 aa, Arabidopsis thaliana
  misc_feature (1)..(161): Ceres Seq. ID no. 13604592
MQAEEIICRVSDEEIIENYLRPKINGETSSIPRYVVELAEELYTVEPWLLPRQTAPILNPGEWFYFGKRNRKYSNLEGVHCEGSWILEDGCIAVLSKETGEEIGGTTRFRYYYRNKGDKESRLKMSNWFMREYRLYYKSRRVFNGRQVFCIITCNDEHFIE

SEQ ID NO: 33946 - DNA, 1342 bp, Arabidopsis thaliana
  misc_feature (1)..(1342): Ceres Seq. ID no. 13604600
gttagcggggtcggttacgaagaaaggaagctcttttacattctcgtggcaacgatctcatctacgtgtcacgaaaactcaaatctcttactccggcgaacgatgtaccgaacggcggcgaagcgtcttctcgccggtggtggaatcactaccacccgtctcctccgattaccgaagctcaggtctacaatcatcccttcctcttacacttccggtctctgcacttcgtcgattggtggtaatactgaatcaccaatgggtaagcagtctgtgaaccctaatcaatcgggtccaacggcgtcgtcttctacgggtacaggggaaggacaacgccgacatgagagcagaaagccgagagctgagttccaagaagagcaggctcgtgttctctctgcgtctctccgtcacgtgccgaggttaggttggacggaagaagcgatgatggctggttcaagggatgttggtgtgtctccttcgattgttgggtctttctccaggaaagaagctgctcttgttgagttcttcatggatgaatgccttcaattgcttatggatagaatagactctggattggatttgcaaaatctgattccaagtgaacgtatctccaagctcattagaattcgtctagaaatgcaagtcccttacatgtcaaaatggccccaagctcttagcattcaggcgcatcctctgaatgtcccaacgagttttaagcaacgggcaatgttagttgatgagatatggcatgctgttggagatggagcctcggatttagattggtatgtcaagcgtactattcttggaggcgtttactcaactaccgagatttacatgctcaccgatgactccttagaacatcgcgatacatgggcattcttggatgacagagtcaaagatgcttttgatcttaagaagagcatacaagaggccaagtattttgcagaagacataggagctggagttgggaagtcggttcaaggactgatgaatggagttatgcagacaatgtccagaagaagtggtggctctgcgttttgaaaagatcacacctttacacatgattctgcttcacactccttacggattctccaatattttgagttgggatttactataataatgagattagacttatatgagttgaagtgaaggcatatgaactaatatattatcttctacgtttgaataaaccattgagtttgaaatctttaatttgtaaataaggatgaaacctgttctgtgtttggttgttctgtgcgtaaacagagttggaaacttgtaattttggtctacttcaatttggtagggtgtttattgttcgaaaacaaacatatgggcactt

SEQ ID NO: 33947 - protein, 345 aa, Arabidopsis thaliana
  misc_feature (1)..(345): Ceres Seq. ID no. 13604601
VSGVGYEERKLFYILVATISSTCHENSNLLLRRTMYRTAAKRLLAGGGITTTRLLRLPKLRSTIIPSSYTSGLCTSSIGGNTESPMGKQSVNPNQSGPTASSSTGTGEGQRRHESRKPRAEFQEEQARVLSASLRHVPRLGWTEEAMMAGSRDVGVSPSIVGSFSRKEAALVEFFMDECLQLLMDRIDSGLDLQNLIPSERISKLIRIRLEMQVPYMSKWPQALSIQAHPLNVPTSFKQRAMLVDEIWHAVGDGASDLDWYVKRTILGGVYSTTEIYMLTDDSLEHRDTWAFLDDRVKDAFDLKKSIQEAKYFAEDIGAGVGKSVQGLMNGVMQTMSRRSGGSAF

SEQ ID NO: 33948 - protein, 311 aa, Arabidopsis thaliana
  misc_feature (1)..(311): Ceres Seq. ID no. 13604602
MYRTAAKRLLAGGGITTTRLLRLPKLRSTIIPSSYTSGLCTSSIGGNTESPMGKQSVNPNQSGPTASSSTGTGEGQRRHESRKPRAEFQEEQARVLSASLRHVPRLGWTEEAMMAGSRDVGVSPSIVGSFSRKEAALVEFFMDECLQLLMDRIDSGLDLQNLIPSERISKLIRIRLEMQVPYMSKWPQALSIQAHPLNVPTSFKQRAMLVDEIWHAVGDGASDLDWYVKRTILGGVYSTTEIYMLTDDSLEHRDTWAFLDDRVKDAFDLKKSIQEAKYFAEDIGAGVGKSVQGLMNGVMQTMSRRSGGSAF

SEQ ID NO: 33949 - protein, 260 aa, Arabidopsis thaliana
  misc_feature (1)..(260): Ceres Seq. ID no. 13604603
MGKQSVNPNQSGPTASSSTGTGEGQRRHESRKPRAEFQEEQARVLSASLRHVPRLGWTEEAMMAGSRDVGVSPSIVGSFSRKEAALVEFFMDECLQLLMDRIDSGLDLQNLIPSERISKLIRIRLEMQVPYMSKWPQALSIQAHPLNVPTSFKQRAMLVDEIWHAVGDGASDLDWYVKRTILGGVYSTTEIYMLTDDSLEHRDTWAFLDDRVKDAFDLKKSIQEAKYFAEDIGAGVGKSVQGLMNGVMQTMSRRSGGSAF

SEQ ID NO: 33950 - DNA, 953 bp, Arabidopsis thaliana
  misc_feature (1)..(953): Ceres Seq. ID no. 13604608
tggcgatctctatttaatcggtcctcgacgcaacttcaacttctactacatccattcacatcaaatcaatacagaaagttttttctatatataaatataaaaggtaaaatgccagggatcacactaggagacacggtgccgaacctagaagtggagacgacacatgacaagttcaaacttcatgactacttcgccaattcttggaccgtcctcttctctcatcccggggatttcacacccgtgtgcaccacggagcttggtgcgatggccaaatacgctcatgagttcgataagagaggcgtgaagctccttggtctgtcttgtgacgatgtacagtcacacaaagactggatcaaagatattgaagcctttaatcacggaagcaaggtgaattacccgataatcgctgacccgaacaaagagatcattcctcagcttaacatgattgatccaattgagaacggaccgtctcgtgcccttcatattgttggtcctgacagtaagataaaattgagcttcttgtatccgtcgaccacgggacgtaacatggacgaagtattgagggctttagactcgttgttgatggcgtccaagcacaataacaagatcgccactccggttaactggaagccagatcaaccggttgtgatttcgcctgctgtgtcggacgaggaagccaaaaagatgttcccacagggtttcaagaccgccgatcttccgtcaaagaaaggctatctgcgtcacacagaggtctcttgaaaagataataacaaaagcctactatataacgtacatgcaagtattgtatgatattaatgtttttacgtacgtgtaaacaaaaataattacgtttgtaacgtatggtgatgatgtggtgcactaggtgtaggccttgtattaataaaaagaagtttgttctatatagagtggtttagtacgacgatttatttact

SEQ ID NO: 33951 - protein, 252 aa, Arabidopsis thaliana
  misc_feature (1)..(252): Ceres Seq. ID no. 13604609
WRSLFNRSSTQLQLLLHPFTSNQYRKFFLYINIKGKMPGITLGDTVPNLEVETTHDKFKLHDYFANSWTVLFSHPGDFTPVCTTELGAMAKYAHEFDKRGVKLLGLSCDDVQSHKDWIKDIEAFNHGSKVNYPIIADPNKEIIPQLNMIDPIENGPSRALHIVGPDSKIKLSFLYPSTTGRNMDEVLRALDSLLMASKHNNKIATPVNWKPDQPVVISPAVSDEEAKKMFPQGFKTADLPSKKGYLRHTEVS

SEQ ID NO: 33952 - protein, 216 aa, Arabidopsis thaliana
  misc_feature (1)..(216): Ceres Seq. ID no. 13604610
MPGITLGDTVPNLEVETTHDKFKLHDYFANSWTVLFSHPGDFTPVCTTELGAMAKYAHEFDKRGVKLLGLSCDDVQSHKDWIKDIEAFNHGSKVNYPIIADPNKEIIPQLNMIDPIENGPSRALHIVGPDSKIKLSFLYPSTTGRNMDEVLRALDSLLMASKHNNKIATPVNWKPDQPVVISPAVSDEEAKKMFPQGFKTADLPSKKGYLRHTEVS

SEQ ID NO: 33953 - protein, 164 aa, Arabidopsis thaliana
  misc_feature (1)..(164): Ceres Seq. ID no. 13604611
MAKYAHEFDKRGVKLLGLSCDDVQSHKDWIKDIEAFNHGSKVNYPIIADPNKEIIPQLNMIDPIENGPSRALHIVGPDSKIKLSFLYPSTTGRNMDEVLRALDSLLMASKHNNKIATPVNWKPDQPVVISPAVSDEEAKKMFPQGFKTADLPSKKGYLRHTEVS

SEQ ID NO: 33954 - DNA, 2290 bp, Arabidopsis thaliana
  misc_feature (1)..(2290): Ceres Seq. ID no. 13604637
catcgctgttccagacagcgatgactcgagaaccggagtattccattctctcattaacggattctctaaagtgcgccaagcgtgcgcaagagccatcatgtcctacgcatctctcagcgtcaaggacctgaccagccttgtttcaagatccggaaccggttcgtcttcttcgctcaagcctccgggtcagacccgccccgtcaaggtcatcccgcttcagcatcctgacacctccaatgaagctcgtcctccttcgattcctttcgacgatatcttctccggatggacggcgaagatcaagcgcatgaggctcgtcgattggattgatactctctttccttgtttccgatggattcgaacttaccgatggagcgagtattttaagctcgatctcatggctggtatcaccgtcggtataatgcttgttccccaggcaatgtcgtatgcgaaactagctggccttccaccaatttacggtctatactcttcatttgtgccggtatttgtctatgccatatttggctcatcccgtcagcttgcaattggacctgtagcattggtttctcttctcgtctctaatgctttgggtggaatcgctgatacgaacgaggaattacatattgaattggccattttgttggcgcttttagttggaatcttggagtgcatcatggggctcttaaggcttggatggcttattcgtttcattagtcactcagtcatatctggatttacaagtgcttcggccattgtgattgggttatctcaaataaaatatttcctggggtatagcattgcccggagcagcaagattgtgccaatagtagagagcataatagctggagctgataagtttcagtggccacctttcgtgatgggatctcttattctggtgattcttcaagtgatgaaacatgtgggaaaagccaaaaaggaacttcagttcttacgagcagcagcgccactcaccgggattgtgctcggtacaaccattgcaaaagtgtttcatccgccttccatctctctggtgggagaaatacctcagggccttccaacattttctttcccaagaagttttgatcatgcaaaaacgttgcttccaacatcagctctcattactggtgttgccatcttggaatctgtgggaattgccaaagcgcttgcggcaaaaaacagatatgagttggattcaaattcagagttgtttggtcttggtgttgcaaatatattggggtcattattttctgcatacccagctacaggatccttttctaggtcagctgtgaataatgaaagtgaagctaagactggcctatcagggcttataacaggaatcatcattggatgttctctactgttcttgacaccgatgtttaaatacataccacagtgtgctttggcagcaatagtgatatctgccgttagtggcttggtggactatgacgaagctattttcctctggcgtgtggacaagagggatttttcgctttggaccatcactagcaccataacattgttcttcggaatagagatcggtgtccttgttggtgttggtttttcactagcattcgttatccacgagtctgcaaaccctcacattgctgtcttggggcggcttccaggcaccactgtgtacagaaacataaagcagtatccagaggcttacacatacaacgggattgtgatagttcgaatcgattctcctatttactttgccaacataagttacatcaaggacagactacgagaatatgaagtagctgttgacaaatacacaaaccggggactggaggtggatagaataaattttgtaatcctggaaatgtctcctgttacacacatagattcgagcgcagtggaagccttgaaagaactgtatcaagagtataaaacaagggatattcagctagcgatatcaaacccgaacaaagatgttcacttgacaatagcaagatcaggaatggtggagctagttggcaaggaatggttctttgtgagagtacacgacgccgtacaggtgtgtctacaatacgtacagagctctaacttggaggacaagcatttaagttttacgagacgatatggtgggagcaacaacaattcatcctcctccaacgcgctgttgaaggagccattgttatcagtggagaaataaaggatatgtaatgtaagtaatagctgtgtatagtttgttgcgattttgtaaaaacagtatacaatcttcattgtatcacctatataacaacattcttactcttcttttcccacaataaaaatagaccttgatgac

SEQ ID NO: 33955 - protein, 717 aa, Arabidopsis thaliana
  misc_feature (1)..(717): Ceres Seq. ID no. 13604638
IAVPDSDDSRTGVFHSLINGFSKVRQACARAIMSYASLSVKDLTSLVSRSGTGSSSSLKPPGQTRPVKVIPLQHPDTSNEARPPSIPFDDIFSGWTAKIKRMRLVDWIDTLFPCFRWIRTYRWSEYFKLDLMAGITVGIMLVPQAMSYAKLAGLPPIYGLYSSFVPVFVYAIFGSSRQLAIGPVALVSLLVSNALGGIADTNEELHIELAILLALLVGILECIMGLLRLGWLIRFISHSVISGFTSASAIVIGLSQIKYFLGYSIARSSKIVPIVESIIAGADKFQWPPFVMGSLILVILQVMKHVGKAKKELQFLRAAAPLTGIVLGTTIAKVFHPPSISLVGEIPQGLPTFSFPRSFDHAKTLLPTSALITGVAILESVGIAKALAAKNRYELDSNSELFGLGVANILGSLFSAYPATGSFSRSAVNNESEAKTGLSGLITGIIIGCSLLFLTPMFKYIPQCALAAIVISAVSGLVDYDEAIFLWRVDKRDFSLWTITSTITLFFGIEIGVLVGVGFSLAFVIHESANPHIAVLGRLPGTTVYRNIKQYPEAYTYNGIVIVRIDSPIYFANISYIKDRLREYEVAVDKYTNRGLEVDRINFVILEMSPVTHIDSSAVEALKELYQEYKTRDIQLAISNPNKDVHLTIARSGMVELVGKEWFFVRVHDAVQVCLQYVQSSNLEDKHLSFTRRYGGSNNNSSSSNALLKEPLLSVEK

SEQ ID NO: 33956 - protein, 685 aa, Arabidopsis thaliana
  misc_feature (1)..(685): Ceres Seq. ID no. 13604639
MSYASLSVKDLTSLVSRSGTGSSSSLKPPGQTRPVKVIPLQHPDTSNEARPPSIPFDDIFSGWTAKIKRMRLVDWIDTLFPCFRWIRTYRWSEYFKLDLMAGITVGIMLVPQAMSYAKLAGLPPIYGLYSSFVPVFVYAIFGSSRQLAIGPVALVSLLVSNALGGIADTNEELHIELAILLALLVGILECIMGLLRLGWLIRFISHSVISGFTSASAIVIGLSQIKYFLGYSIARSSKIVPIVESIIAGADKFQWPPFVMGSLILVILQVMKHVGKAKKELQFLRAAAPLTGIVLGTTIAKVFHPPSISLVGEIPQGLPTFSFPRSFDHAKTLLPTSALITGVAILESVGIAKALAAKNRYELDSNSELFGLGVANILGSLFSAYPATGSFSRSAVNNESEAKTGLSGLITGIIIGCSLLFLTPMFKYIPQCALAAIVISAVSGLVDYDEAIFLWRVDKRDFSLWTITSTITLFFGIEIGVLVGVGFSLAFVIHESANPHIAVLGRLPGTTVYRNIKQYPEAYTYNGIVIVRIDSPIYFANISYIKDRLREYEVAVDKYTNRGLEVDRINFVILEMSPVTHIDSSAVEALKELYQEYKTRDIQLAISNPNKDVHLTIARSGMVELVGKEWFFVRVHDAVQVCLQYVQSSNLEDKHLSFTRRYGGSNNNSSSSNALLKEPLLSVEK

SEQ ID NO: 33957 - protein, 616 aa, Arabidopsis thaliana
  misc_feature (1)..(616): Ceres Seq. ID no. 13604640
MRLVDWIDTLFPCFRWIRTYRWSEYFKLDLMAGITVGIMLVPQAMSYAKLAGLPPIYGLYSSFVPVFVYAIFGSSRQLAIGPVALVSLLVSNALGGIADTNEELHIELAILLALLVGILECIMGLLRLGWLIRFISHSVISGFTSASAIVIGLSQIKYFLGYSIARSSKIVPIVESIIAGADKFQWPPFVMGSLILVILQVMKHVGKAKKELQFLRAAAPLTGIVLGTTIAKVFHPPSISLVGEIPQGLPTFSFPRSFDHAKTLLPTSALITGVAILESVGIAKALAAKNRYELDSNSELFGLGVANILGSLFSAYPATGSFSRSAVNNESEAKTGLSGLITGIIIGCSLLFLTPMFKYIPQCALAAIVISAVSGLVDYDEAIFLWRVDKRDFSLWTITSTITLFFGIEIGVLVGVGFSLAFVIHESANPHIAVLGRLPGTTVYRNIKQYPEAYTYNGIVIVRIDSPIYFANISYIKDRLREYEVAVDKYTNRGLEVDRINFVILEMSPVTHIDSSAVEALKELYQEYKTRDIQLAISNPNKDVHLTIARSGMVELVGKEWFFVRVHDAVQVCLQYVQSSNLEDKHLSFTRRYGGSNNNSSSSNALLKEPLLSVEK

SEQ ID NO: 33958 - DNA, 2526 bp, Arabidopsis thaliana
  misc_feature (1)..(2526): Ceres Seq. ID no. 13604660
aagtgtagtgctattaaactatcccttttattttcccacccaactcaatttattttctcattctttctctttactcttcttcagatctctctgtttctttctttgttgttgttatctggggatgctttctactctctgtttggtttccttcattgtgactttctattttctgggtttgtttcaagtcatgatttttccgatacccttttgatttttcttgctatttctcacctctgtataagcaagctctctgctgtttctcctcatccaagttgggtttatcagttcagctgtgtagaaattcaatcgtctgagaagtccgaggtttgatgtctgatggttttaagatcgaaaggatttgacttttatcagattagtaatgagattagattgtttttgaggttattgtaatcagatcttgatgctatttctggtgaaagagatttaagacaagttagggaatgggtaatacttgtgttggaccaagcagaaatggcttcttgcaatctgtttcagctgcaatgtggcggccaagagatggagatgattcggcttccatgagtaatggagatattgcaagtgaagctgtttcgggagagcttcgatctcgattatctgatgaagtccagaataaacctcctgaacaggtcacaatgccgaagccagggactgacgtcgagaccaaggacagagagattcgaactgaaagcaagcctgaaacgctagaggagataagccttgagtccaaaccagagactaagcaggagaccaagtcagagaccaagccggagtcaaaacctgatcctccagctaaacctaagaagcctaaacacatgaagagagtgtcaagtgcagggcttaggactgagtcagtgttgcagaggaagactgaaaacttcaaggaattctattccttgggaaggaaactcggacaagggcaatttgggacgacttttttatgtgtcgagaagactacggggaaggagtttgcctgcaagtcgattgctaagaggaagctattgactgatgaggacgttgaggatgtgagaagagaaattcagataatgcatcacttggctggtcaccctaatgtcatctccatcaaaggagcttatgaggatgttgtggcagtgcaccttgtaatggagtgttgtgcaggcggcgagctttttgacaggatcattcaacgcggtcactacacagagaggaaagcggctgagctcactagaaccattgttggggttgtagaggcttgccattctcttggtgttatgcatcgagacctcaagcccgagaattttctgtttgtcagtaaacacgaagattccctcttgaagacgattgattttggactctccatgttctttaaaccagacgatgtttttacagatgttgttggtagcccatattatgttgccccagaagttcttcgaaagcgttatggccctgaagctgatgtctggagtgctggagtgattgtgtacattttattaagcggagttcctccattctgggctgaaaccgaacaaggtattttcgaacaggtcctccacggtgatcttgacttttcgtccgatccatggccaagtatatctgaaagtgcaaaggatttagtgaggaaaatgcttgtcagggatcccaagaaaaggttaactgcccaccaagtattatgtcatccatgggttcaagtcgacggtgtggctccagacaagcctttggattctgctgttctgagccgtatgaagcagttttctgcaatgaacaagttcaagaaaatggctcttagagtcattgctgagagcttatctgaagaagaaatcgccggcttgaaagaaatgtttaatatgatagatgcggacaagagtggtcagataactttcgaagaactgaaagcaggactaaaacgagtaggggcgaatctcaaagagtctgaaattctcgacttgatgcaagctgctgatgtggacaacagcggaacaatagattacaaagagttcatagctgcaacattacatctaaacaaaatagagagagaggaccatttgtttgcagcctttacatactttgacaaagatgggagcggctatatcaccccagacgagcttcaacaagcttgtgaggagtttggtgttgaggatgtccgcatagaagaactgatgcgcgatgttgatcaagacaatgacgggcgaatagactacaacgagtttgtggcgatgatgcagaaaggaagcatcacaggaggacctgtgaaaatgggtctagagaaaagctttagcattgctcttaaactctagtttctcagtctatttaaaagtacaaaactaaagccaagaagacaaaagagttttctgataatatataccattttgattatgttgaagacatatgcacacagccaagattctctcttgccctcttttggattctctcaatcttttggatgaggttttgtcttagacttgttttggaaactttgttgtattgtgttacttcttgagcatatatagtcttctaacattacaaacc

SEQ ID NO: 33959 - protein, 610 aa, Arabidopsis thaliana
  misc_feature (1)..(610): Ceres Seq. ID no. 13604661
MGNTCVGPSRNGFLQSVSAAMWRPRDGDDSASMSNGDIASEAVSGELRSRLSDEVQNKPPEQVTMPKPGTDVETKDREIRTESKPETLEEISLESKPETKQETKSETKPESKPDPPAKPKKPKHMKRVSSAGLRTESVLQRKTENFKEFYSLGRKLGQGQFGTTFLCVEKTTGKEFACKSIAKRKLLTDEDVEDVRREIQIMHHLAGHPNVISIKGAYEDVVAVHLVMECCAGGELFDRIIQRGHYTERKAAELTRTIVGVVEACHSLGVMHRDLKPENFLFVSKHEDSLLKTIDFGLSMFFKPDDVFTDVVGSPYYVAPEVLRKRYGPEADVWSAGVIVYILLSGVPPFWAETEQGIFEQVLHGDLDFSSDPWPSISESAKDLVRKMLVRDPKKRLTAHQVLCHPWVQVDGVAPDKPLDSAVLSRMKQFSAMNKFKKMALRVIAESLSEEEIAGLKEMFNMIDADKSGQITFEELKAGLKRVGANLKESEILDLMQAADVDNSGTIDYKEFIAATLHLNKIEREDHLFAAFTYFDKDGSGYITPDELQQACEEFGVEDVRIEELMRDVDQDNDGRIDYNEFVAMMQKGSITGGPVKMGLEKSFSIALKL

SEQ ID NO: 33960 - protein, 590 aa, Arabidopsis thaliana
  misc_feature (1)..(590): Ceres Seq. ID no. 13604662
MWRPRDGDDSASMSNGDIASEAVSGELRSRLSDEVQNKPPEQVTMPKPGTDVETKDREIRTESKPETLEEISLESKPETKQETKSETKPESKPDPPAKPKKPKHMKRVSSAGLRTESVLQRKTENFKEFYSLGRKLGQGQFGTTFLCVEKTTGKEFACKSIAKRKLLTDEDVEDVRREIQIMHHLAGHPNVISIKGAYEDVVAVHLVMECCAGGELFDRIIQRGHYTERKAAELTRTIVGVVEACHSLGVMHRDLKPENFLFVSKHEDSLLKTIDFGLSMFFKPDDVFTDVVGSPYYVAPEVLRKRYGPEADVWSAGVIVYILLSGVPPFWAETEQGIFEQVLHGDLDFSSDPWPSISESAKDLVRKMLVRDPKKRLTAHQVLCHPWVQVDGVAPDKPLDSAVLSRMKQFSAMNKFKKMALRVIAESLSEEEIAGLKEMFNMIDADKSGQITFEELKAGLKRVGANLKESEILDLMQAADVDNSGTIDYKEFIAATLHLNKIEREDHLFAAFTYFDKDGSGYITPDELQQACEEFGVEDVRIEELMRDVDQDNDGRIDYNEFVAMMQKGSITGGPVKMGLEKSFSIALKL

SEQ ID NO: 33961 - protein, 578 aa, Arabidopsis thaliana
  misc_feature (1)..(578): Ceres Seq. ID no. 13604663
MSNGDIASEAVSGELRSRLSDEVQNKPPEQVTMPKPGTDVETKDREIRTESKPETLEEISLESKPETKQETKSETKPESKPDPPAKPKKPKHMKRVSSAGLRTESVLQRKTENFKEFYSLGRKLGQGQFGTTFLCVEKTTGKEFACKSIAKRKLLTDEDVEDVRREIQIMHHLAGHPNVISIKGAYEDVVAVHLVMECCAGGELFDRIIQRGHYTERKAAELTRTIVGVVEACHSLGVMHRDLKPENFLFVSKHEDSLLKTIDFGLSMFFKPDDVFTDVVGSPYYVAPEVLRKRYGPEADVWSAGVIVYILLSGVPPFWAETEQGIFEQVLHGDLDFSSDPWPSISESAKDLVRKMLVRDPKKRLTAHQVLCHPWVQVDGVAPDKPLDSAVLSRMKQFSAMNKFKKMALRVIAESLSEEEIAGLKEMFNMIDADKSGQITFEELKAGLKRVGANLKESEILDLMQAADVDNSGTIDYKEFIAATLHLNKIEREDHLFAAFTYFDKDGSGYITPDELQQACEEFGVEDVRIEELMRDVDQDNDGRIDYNEFVAMMQKGSITGGPVKMGLEKSFSIALKL

SEQ ID NO: 33962 - DNA, 1937 bp, Arabidopsis thaliana
  misc_feature (1)..(1937): Ceres Seq. ID no. 13604664
actcgagaacatcaaaaacatttgatcacacaaaacttcaatatctcacaaacgagaggccggttaggaggaaattacaaaaatgtcctcctacggcagactcgacgagcatgagcaagcgaaacttgaggcaagtcggaagacaaagaagagaattgccatcatcgctatatcttccatcgttctcgtctgcattgtcgtcggagccgtcgttggaaccacagctcgcgataacagcaagaaaccaccgacggagaataacggagagccaatatcagtctccgtgaaagccctgtgcgacgtgacattgcacaaagaaaaatgtttcgagacccttggatcggctccaaacgcgagccgatcaagcccagaggagcttttcaagtacgccgtcaaagtcaccatcacggagctctcgaaagttctcgacggattctccaacggcgaacacatggataacgccacgtcagcagcaatgggggcttgcgtggagcttatcgggctagccgttgatcaactcaacgaaacaatgacgtcgtccttgaagaactttgacgatctaaggacgtggcttagctccgtgggaacgtaccaagaaacgtgtatggatgcgttagtggaagcgaacaaaccaagtttaacgactttcggagaaaaccatttgaaaaactcgacggagatgactagcaatgcgttagcgatcataacgtggctagggaaaatcgctgacaccgttaagtttagacgacgtcgtttgttggagactggtaacgccaaagtcgttgtagctgacttgccgatgatggaaggtcggagacttttggagagtggtgatttgaagaagaaagcgactatcgtggtggctaaagacgggtcggggaaatatcggacgattggtgaggctttagcggaagtggaggagaagaatgagaaacctacgattatatatgtgaagaaaggagtttatttagagaatgttagggttgagaagacgaaatggaatgttgtgatggttggagatggacaaagtaagactatcgtctctgctggactcaacttcatcgatggaacccccactttcgaaaccgccacatttgctgtgtttggaaaggggttcatggctagggacatgggcttcattaacacagctggtccagctaagcatcaagccgtagctctaatggtaagcgcagacttatctgtgttctacaagtgcaccatggacgctttccaagatacaatgtacgctcatgcacaacgtcagttttaccgtgattgtgttatcctcggaaccgttgattttatatttggaaacgctgcggttgtattccaaaagtgcgagatcttgcctcgtcgtcctatgaaaggccagcagaatacaataaccgctcagggccggaaagatccgaaccaaaacacaggaatttctatccacaattgtactatcaagcctttggataacttaaccgatatccaaacattcctaggccggccttggaaggatttctctacaacggttatcatgaagtcgttcatggacaaattcatcaacccgaaagggtggttaccgtggacaggagataccgcgccagacacgatcttttacgccgagtacttaaattccgggccaggagcatcgaccaagaaccgggttaagtggcaagggttgaagacgtctttaacaaagaaggaagcaaataagtttacggtgaaaccttttatagacggcaataactggttgccggctaccaaagttcccttcaactctgatttttgatattttttgctggaaaaggctggtctgaaaactgatgcatggctagtcgttctttaatttgtttataacgaacatacaacattcccttctaaaacattttcttgtattggctttatttcaaagtgtctgaatttgtttctatatattcatataatttcgg

SEQ ID NO: 33963 - protein, 564 aa, Arabidopsis thaliana
  misc_feature (1)..(564): Ceres Seq. ID no. 13604665
MSSYGRLDEHEQAKLEASRKTKKRIAIIAISSIVLVCIVVGAVVGTTARDNSKKPPTENNGEPISVSVKALCDVTLHKEKCFETLGSAPNASRSSPEELFKYAVKVTITELSKVLDGFSNGEHMDNATSAAMGACVELIGLAVDQLNETMTSSLKNFDDLRTWLSSVGTYQETCMDALVEANKPSLTTFGENHLKNSTEMTSNALAIITWLGKIADTVKFRRRRLLETGNAKVVVADLPMMEGRRLLESGDLKKKATIVVAKDGSGKYRTIGEALAEVEEKNEKPTIIYVKKGVYLENVRVEKTKWNVVMVGDGQSKTIVSAGLNFIDGTPTFETATFAVFGKGFMARDMGFINTAGPAKHQAVALMVSADLSVFYKCTMDAFQDTMYAHAQRQFYRDCVILGTVDFIFGNAAVVFQKCEILPRRPMKGQQNTITAQGRKDPNQNTGISIHNCTIKPLDNLTDIQTFLGRPWKDFSTTVIMKSFMDKFINPKGWLPWTGDTAPDTIFYAEYLNSGPGASTKNRVKWQGLKTSLTKKEANKFTVKPFIDGNNWLPATKVPFNSDF

SEQ ID NO: 33964 - protein, 441 aa, Arabidopsis thaliana
  misc_feature (1)..(441): Ceres Seq. ID no. 13604666
MDNATSAAMGACVELIGLAVDQLNETMTSSLKNFDDLRTWLSSVGTYQETCMDALVEANKPSLTTFGENHLKNSTEMTSNALAIITWLGKIADTVKFRRRRLLETGNAKVVVADLPMMEGRRLLESGDLKKKATIVVAKDGSGKYRTIGEALAEVEEKNEKPTIIYVKKGVYLENVRVEKTKWNVVMVGDGQSKTIVSAGLNFIDGTPTFETATFAVFGKGFMARDMGFINTAGPAKHQAVALMVSADLSVFYKCTMDAFQDTMYAHAQRQFYRDCVILGTVDFIFGNAAVVFQKCEILPRRPMKGQQNTITAQGRKDPNQNTGISIHNCTIKPLDNLTDIQTFLGRPWKDFSTTVIMKSFMDKFINPKGWLPWTGDTAPDTIFYAEYLNSGPGASTKNRVKWQGLKTSLTKKEANKFTVKPFIDGNNWLPATKVPFNSDF

SEQ ID NO: 33965 - protein, 433 aa, Arabidopsis thaliana
  misc_feature (1)..(433): Ceres Seq. ID no. 13604667
MGACVELIGLAVDQLNETMTSSLKNFDDLRTWLSSVGTYQETCMDALVEANKPSLTTFGENHLKNSTEMTSNALAIITWLGKIADTVKFRRRRLLETGNAKVVVADLPMMEGRRLLESGDLKKKATIVVAKDGSGKYRTIGEALAEVEEKNEKPTIIYVKKGVYLENVRVEKTKWNVVMVGDGQSKTIVSAGLNFIDGTPTFETATFAVFGKGFMARDMGFINTAGPAKHQAVALMVSADLSVFYKCTMDAFQDTMYAHAQRQFYRDCVILGTVDFIFGNAAVVFQKCEILPRRPMKGQQNTITAQGRKDPNQNTGISIHNCTIKPLDNLTDIQTFLGRPWKDFSTTVIMKSFMDKFINPKGWLPWTGDTAPDTIFYAEYLNSGPGASTKNRVKWQGLKTSLTKKEANKFTVKPFIDGNNWLPATKVPFNSDF

SEQ ID NO: 33966 - DNA, 1875 bp, Arabidopsis thaliana
  misc_feature (1)..(1875): Ceres Seq. ID no. 13604668
atgcaaactcattcttcatctctcgtgttcttggctcttctctgtctgtcatgggctttactagtctcaccaacacgtcctccgtcacaacctccatcacatcctccaatacagccttcgtcacagccgccaacacagcctccgtcacagccaccaacgcagcctccaacacagcctccgtcacatccaccaacacagcctccaacaccgccaccatcacagtctccatcgcagccttctccactaccaccaaacatcgcttgtaaatccactccttacccaaagctctgccgcacgatcctctccgccgttaaatcatcaccttccgatccttaccattacggaaagttcacaatgaagcaatgcctcaaacaagctcgtcgcctctccaaagtcatcaaccgctttgcccagcgcgtggaagctgatccaggtacgtcgacggtggaagaggtcagtgcggtggctgattgcggtgagctagcagagcttagcgtcgaataccttgaaacggttacggaggagctgaaagcggcggagctgatgacggctgcgctcgttgatcgtgtcacgagtcttctcggtggcgttgtgactaatcagcagacgtgcctcgacggtcttgtggacgctaagagcggatttgcgacggcgattggaacgccgttagggaatctaacgcgcctctacagtgtgtcgttggggcttgtgagtcacgcgcttaaccgtaatttgaagaggtataaaggttccaaggggaaaatctttggtggtggtaacaaacccgttcgtgaacctctcgagactttgattaaggttttacgcaaaacatgcgacaagggcaaagattgtcggaaagctaacagaaatttaggtgagctaggagagacgagcggtggatcgatcctcgtaagggaagcagtgaccgtcggtccatatgaaaccgataacttccccaccataactgaggccgttgctgccgcacctaatcacacattcccggagcaaggctacttcgtaatctatgcaagggcaggtctttacgaagaatatgttgtcatttcaaataaaaaaagaaacataatgcttattggggacggaatcaataaaactatcatttctggaaaccacagttttattgatggttggacaacgtataattcttcgacctttgcggtggtgggagaccgatttgttgcggttgatgtgacattccgaaacacagctggaccagagaagcaccaggctgtggccgtaagaaacaatgcggatggatcgacattttatcgatgtagttttgaaggctatcaagatactctttacgttcattctttgagacagttctatcgtgaatgtgatatatatgggaccatagattttatattcggaaatgcagctgccatatttcaaaactgcaacatatatgcccgaaaaccgatggcaaatcagaagaatgcagtgacagcccatggaagaactgacccaaaccagaaaactggaatctccatcattaattgtactattggagctgccccggacctcgctgctgaccccaagtcgaccatgacattccttgggcggccatggaagccttactcgaggacggtctacatacaatcatacatcagcgatgttgtccaaccggtagggtggctggaatggaatggtacaaccgggctagacacgatctcctatggtgaatatgacaattttggaccgggggctgatacaagtaaaagggtccaatggtcaggatatagcctattgaacttggtacaagccatgaacttcaccgtatataatttcactttgggagacacttggttgcctcagactgacattcccttctacggcggtttgcttcacaccgaatga

SEQ ID NO: 33967 - protein, 624 aa, Arabidopsis thaliana
  misc_feature (1)..(624): Ceres Seq. ID no. 13604669
MQTHSSSLVFLALLCLSWALLVSPTRPPSQPPSHPPIQPSSQPPTQPPSQPPTQPPTQPPSHPPTQPPTPPPSQSPSQPSPLPPNIACKSTPYPKLCRTILSAVKSSPSDPYHYGKFTMKQCLKQARRLSKVINRFAQRVEADPGTSTVEEVSAVADCGELAELSVEYLETVTEELKAAELMTAALVDRVTSLLGGVVTNQQTCLDGLVDAKSGFATAIGTPLGNLTRLYSVSLGLVSHALNRNLKRYKGSKGKIFGGGNKPVREPLETLIKVLRKTCDKGKDCRKANRNLGELGETSGGSILVREAVTVGPYETDNFPTITEAVAAAPNHTFPEQGYFVIYARAGLYEEYVVISNKKRNIMLIGDGINKTIISGNHSFIDGWTTYNSSTFAVVGDRFVAVDVTFRNTAGPEKHQAVAVRNNADGSTFYRCSFEGYQDTLYVHSLRQFYRECDIYGTIDFIFGNAAAIFQNCNIYARKPMANQKNAVTAHGRTDPNQKTGISIINCTIGAAPDLAADPKSTMTFLGRPWKPYSRTVYIQSYISDVVQPVGWLEWNGTTGLDTISYGEYDNFGPGADTSKRVQWSGYSLLNLVQAMNFTVYNFTLGDTWLPQTDIPFYGGLLHTE

SEQ ID NO: 33968 - protein, 506 aa, Arabidopsis thaliana
  misc_feature (1)..(506): Ceres Seq. ID no. 13604670
MKQCLKQARRLSKVINRFAQRVEADPGTSTVEEVSAVADCGELAELSVEYLETVTEELKAAELMTAALVDRVTSLLGGVVTNQQTCLDGLVDAKSGFATAIGTPLGNLTRLYSVSLGLVSHALNRNLKRYKGSKGKIFGGGNKPVREPLETLIKVLRKTCDKGKDCRKANRNLGELGETSGGSILVREAVTVGPYETDNFPTITEAVAAAPNHTFPEQGYFVIYARAGLYEEYVVISNKKRNIMLIGDGINKTIISGNHSFIDGWTTYNSSTFAVVGDRFVAVDVTFRNTAGPEKHQAVAVRNNADGSTFYRCSFEGYQDTLYVHSLRQFYRECDIYGTIDFIFGNAAAIFQNCNIYARKPMANQKNAVTAHGRTDPNQKTGISIINCTIGAAPDLAADPKSTMTFLGRPWKPYSRTVYIQSYISDVVQPVGWLEWNGTTGLDTISYGEYDNFGPGADTSKRVQWSGYSLLNLVQAMNFTVYNFTLGDTWLPQTDIPFYGGLLHTE

SEQ ID NO: 33969 - protein, 443 aa, Arabidopsis thaliana
  misc_feature (1)..(443): Ceres Seq. ID no. 13604671
MTAALVDRVTSLLGGVVTNQQTCLDGLVDAKSGFATAIGTPLGNLTRLYSVSLGLVSHALNRNLKRYKGSKGKIFGGGNKPVREPLETLIKVLRKTCDKGKDCRKANRNLGELGETSGGSILVREAVTVGPYETDNFPTITEAVAAAPNHTFPEQGYFVIYARAGLYEEYVVISNKKRNIMLIGDGINKTIISGNHSFIDGWTTYNSSTFAVVGDRFVAVDVTFRNTAGPEKHQAVAVRNNADGSTFYRCSFEGYQDTLYVHSLRQFYRECDIYGTIDFIFGNAAAIFQNCNIYARKPMANQKNAVTAHGRTDPNQKTGISIINCTIGAAPDLAADPKSTMTFLGRPWKPYSRTVYIQSYISDVVQPVGWLEWNGTTGLDTISYGEYDNFGPGADTSKRVQWSGYSLLNLVQAMNFTVYNFTLGDTWLPQTDIPFYGGLLHTE

SEQ ID NO: 33970 - DNA, 2131 bp, Arabidopsis thaliana
  misc_feature (1)..(2131): Ceres Seq. ID no. 13604679
gcgggcttcataaatctatatacagacaaatttacacataaagaaacgcattaaaaaaactatttactcagattcagcttcttctccacgcaaagactcgcttctctttttttctcttcctgagtttggattttttttgcttgagctgaatcatgttttattctcaccagcttctagctcgaaaagctccgttgggtcagatatggatggccgctacattgcacgcgaagatcaaccggaagaaactagataagctcgatatcattcaaatctgcgaagagattttgaatccgtcggttccgatggctcttagactctccgggattcttatgggtggtgttgtgattgtttatgagaggaaagtgaagctcctattcgatgatgttaatcgctttctggttgaaattaatggagcttggcgcacaaaatctgttccggatcccactttactacctaaaggaaaaacccatgccaggaaagaggctgttacattgcctgagaacgaagaagctgattttggagattttgaacagactcgtaatgttcctaaatttggcaattacatggattttcagcagacttttatttccatgcggttagatgaatcccatgttaacaataaccccgagccagaagatcttggacagcagttccatcaagctgatgccgagaatatcacactctttgagtatcatggttcattccagaccaacaatgaaacatatgatcgttttgaaagatttgacatcgaaggagatgatgaaacacagatgaactccaatccaagagaaggcgctgaaatacctacaactctcatcccatcaccacctcgtcatcatgacattcccgaaggagtcaaccccacaagccctcagcgccaggagcaacaggagaatcgtagggacggatttgctgagcagatggaggaacaaaacataccggacaaagaggaacacgatagaccacaaccagcgaaaaagagagcaagaaagacagctacttcagcgatggattatgagcaaactattatcgctggtcatgtttaccagtcatggctccaggatacttctgacattctctgtaggggggaaaagagaaaggttcgaggaactatccggccagacatggaaagtttcaaacgtgcgaatatgccacctacacaactctttgaaaaggacagttcttacccgcctcagctttaccagctttggtcaaagaatactcaagttcttcaaacctcatcatctgaatctcgacatcctgatctccgtgcggaacaatctccagggtttgttcaggagagaatgcataaccaccatcaaacagaccatcatgagcgcagtgacacaagctcccaaaatcttgatagtcccgcagaaatactccggacagttcgtactgggaaaggtgcttcagtagaaagcatgatggctggatctcgagcaagccctgaaactattaaccgccaggctgctgatattaatgtcacgccattctattctggagatgatgtgagatccatgcctagtacaccatccgcacgtggagcagcttcaattaacaacatagagatcagctctaaaagtcgcatgcccaatagaaaaagaccaaattcctcaccaagaagaggactcgaaccagtggcggaagagagaccgtgggagcaccgtgaatatgagtttgagttttcaatgttacctgaaaaacgcttcacagccgataaagaaatactatttgaaactgcatctacacagactcaaaagccagtgtgcaatcaatcagacgagatgataacagatagcatcaaaagtcacctgaagacacactttgaaacacctggagctcctcaagtggaatctcttaacaagctcgctgttggaatggacagaaacgctgcagctaaactcttcttccaatcctgtgtgttagctactcgcggagtcatcaaggtaaaccaagcagagccttatggggacattctcattgcaagaggacccaacatgtaaggtttgatttctaaattataaaagattctggtgaaccgattatccatagttgttttgcttttcatattctagcagagagagttcgtagacttttttaagttataaagagcaagcgttctttaccc

SEQ ID NO: 33971 - protein, 617 aa, Arabidopsis thaliana
  misc_feature (1)..(617): Ceres Seq. ID no. 13604680
MFYSHQLLARKAPLGQIWMAATLHAKINRKKLDKLDIIQICEEILNPSVPMALRLSGILMGGVVIVYERKVKLLFDDVNRFLVEINGAWRTKSVPDPTLLPKGKTHARKEAVTLPENEEADFGDFEQTRNVPKFGNYMDFQQTFISMRLDESHVNNNPEPEDLGQQFHQADAENITLFEYHGSFQTNNETYDRFERFDIEGDDETQMNSNPREGAEIPTTLIPSPPRHHDIPEGVNPTSPQRQEQQENRRDGFAEQMEEQNIPDKEEHDRPQPAKKRARKTATSAMDYEQTIIAGHVYQSWLQDTSDILCRGEKRKVRGTIRPDMESFKRANMPPTQLFEKDSSYPPQLYQLWSKNTQVLQTSSSESRHPDLRAEQSPGFVQERMHNHHQTDHHERSDTSSQNLDSPAEILRTVRTGKGASVESMMAGSRASPETINRQAADINVTPFYSGDDVRSMPSTPSARGAASINNIEISSKSRMPNRKRPNSSPRRGLEPVAEERPWEHREYEFEFSMLPEKRFTADKEILFETASTQTQKPVCNQSDEMITDSIKSHLKTHFETPGAPQVESLNKLAVGMDRNAAAKLFFQSCVLATRGVIKVNQAEPYGDILIARGPNM

SEQ ID NO: 33972 - protein, 599 aa, Arabidopsis thaliana
  misc_feature (1)..(599): Ceres Seq. ID no. 13604681
MAATLHAKINRKKLDKLDIIQICEEILNPSVPMALRLSGILMGGVVIVYERKVKLLFDDVNRFLVEINGAWRTKSVPDPTLLPKGKTHARKEAVTLPENEEADFGDFEQTRNVPKFGNYMDFQQTFISMRLDESHVNNNPEPEDLGQQFHQADAENITLFEYHGSFQTNNETYDRFERFDIEGDDETQMNSNPREGAEIPTTLIPSPPRHHDIPEGVNPTSPQRQEQQENRRDGFAEQMEEQNIPDKEEHDRPQPAKKRARKTATSAMDYEQTIIAGHVYQSWLQDTSDILCRGEKRKVRGTIRPDMESFKRANMPPTQLFEKDSSYPPQLYQLWSKNTQVLQTSSSESRHPDLRAEQSPGFVQERMHNHHQTDHHERSDTSSQNLDSPAEILRTVRTGKGASVESMMAGSRASPETINRQAADINVTPFYSGDDVRSMPSTPSARGAASINNIEISSKSRMPNRKRPNSSPRRGLEPVAEERPWEHREYEFEFSMLPEKRFTADKEILFETASTQTQKPVCNQSDEMITDSIKSHLKTHFETPGAPQVESLNKLAVGMDRNAAAKLFFQSCVLATRGVIKVNQAEPYGDILIARGPNM

SEQ ID NO: 33973 - protein, 567 aa, Arabidopsis thaliana
  misc_feature (1)..(567): Ceres Seq. ID no. 13604682
MALRLSGILMGGVVIVYERKVKLLFDDVNRFLVEINGAWRTKSVPDPTLLPKGKTHARKEAVTLPENEEADFGDFEQTRNVPKFGNYMDFQQTFISMRLDESHVNNNPEPEDLGQQFHQADAENITLFEYHGSFQTNNETYDRFERFDIEGDDETQMNSNPREGAEIPTTLIPSPPRHHDIPEGVNPTSPQRQEQQENRRDGFAEQMEEQNIPDKEEHDRPQPAKKRARKTATSAMDYEQTIIAGHVYQSWLQDTSDILCRGEKRKVRGTIRPDMESFKRANMPPTQLFEKDSSYPPQLYQLWSKNTQVLQTSSSESRHPDLRAEQSPGFVQERMHNHHQTDHHERSDTSSQNLDSPAEILRTVRTGKGASVESMMAGSRASPETINRQAADINVTPFYSGDDVRSMPSTPSARGAASINNIEISSKSRMPNRKRPNSSPRRGLEPVAEERPWEHREYEFEFSMLPEKRFTADKEILFETASTQTQKPVCNQSDEMITDSIKSHLKTHFETPGAPQVESLNKLAVGMDRNAAAKLFFQSCVLATRGVIKVNQAEPYGDILIARGPNM

SEQ ID NO: 33974 - DNA, 948 bp, Arabidopsis thaliana
  misc_feature (1)..(948): Ceres Seq. ID no. 13604742
aaatcaaatcttttcatttacaattatctttcttctcaatttagaacttagtagctagtcttcaagataatggcacttgaaactcttacttctccaagattatcttctccgatgccgactctgtttcaagattcagcactagggtttcatggaagcaaaggcaaacgatctaagcgatcaagatctgaattcgaccgtcagagtctcacggaggatgaatatatcgctttatgtctcatgcttcttgctcgcgacggagatagaaaccgtgaccttgacctgccttcttcttcgtcttcacctcctctgcttcctcctcttcctactccgatctacaagtgtagcgtctgtgacaaggcgttttcgtcttaccaggctcttggtggacacaaggcaagtcaccggaaaagcttttcgcttactcaatctgccggaggagatgagctgtcgacatcgtcggcgataaccacgtctggtatatccggtggcgggggaggaagtgtgaagtcgcacgtttgctctatctgtcataaatcgttcgccaccggtcaagctctcggcggccacaaacggtgccactacgaaggaaagaacggaggcggtgtgagtagtagcgtgtcgaattctgaagatgtggggtctacaagccacgtcagcagtggccaccgtgggtttgacctcaacataccgccgataccggaattctcgatggtcaacggagacgaagaggtgatgagtcctatgccggcgaagaaactccggtttgacttcccggagaaaccctaaacataaacctaggaaaaactttacagaattcattttataggaaattgttttactgtatatacaaatatcgattttgattgatgttcttcttcactgaaaaattatgattctttgttgtataattgatgtttctgaaaaagatataactttttattgtttcac

SEQ ID NO: 33975 - protein, 238 aa, Arabidopsis thaliana
  misc_feature (1)..(238): Ceres Seq. ID no. 13604743
MALETLTSPRLSSPMPTLFQDSALGFHGSKGKRSKRSRSEFDRQSLTEDEYIALCLMLLARDGDRNRDLDLPSSSSSPPLLPPLPTPIYKCSVCDKAFSSYQALGGHKASHRKSFSLTQSAGGDELSTSSAITTSGISGGGGGSVKSHVCSICHKSFATGQALGGHKRCHYEGKNGGGVSSSVSNSEDVGSTSHVSSGHRGFDLNIPPIPEFSMVNGDEEVMSPMPAKKLRFDFPEKP

SEQ ID NO: 33976 - protein, 224 aa, Arabidopsis thaliana
  misc_feature (1)..(224): Ceres Seq. ID no. 13604744
MPTLFQDSALGFHGSKGKRSKRSRSEFDRQSLTEDEYIALCLMLLARDGDRNRDLDLPSSSSSPPLLPPLPTPIYKCSVCDKAFSSYQALGGHKASHRKSFSLTQSAGGDELSTSSAITTSGISGGGGGSVKSHVCSICHKSFATGQALGGHKRCHYEGKNGGGVSSSVSNSEDVGSTSHVSSGHRGFDLNIPPIPEFSMVNGDEEVMSPMPAKKLRFDFPEKP

SEQ ID NO: 33977 - protein, 182 aa, Arabidopsis thaliana
  misc_feature (1)..(182): Ceres Seq. ID no. 13604745
MLLARDGDRNRDLDLPSSSSSPPLLPPLPTPIYKCSVCDKAFSSYQALGGHKASHRKSFSLTQSAGGDELSTSSAITTSGISGGGGGSVKSHVCSICHKSFATGQALGGHKRCHYEGKNGGGVSSSVSNSEDVGSTSHVSSGHRGFDLNIPPIPEFSMVNGDEEVMSPMPAKKLRFDFPEKP

SEQ ID NO: 33978 - DNA, 839 bp, Arabidopsis thaliana
  misc_feature (1)..(839): Ceres Seq. ID no. 13604760
aaagagaagaaggagcaaaaaggttttgccgaagttgagagatcaatcaaagatttgaagttccgatgaattcaggaggtggaatcgttgctgcagcagctccttcaagcggcggtggtaatgttgaatggcatgtccgaccaccgaaccctaaaaacccagttgtcttcttcgacgtctctattggtggtatccccgccggtcgtatcaagatggagctcttcgccgacattgctcccaaaaccgctgaaaacttcaggcagttctgtactggtgaactcagaaaagctggaaagccgcttggttacaaagaatgtcagtttcacagagtcatcaaagattttatggttcaaagtggtgattttcttaagaatgatggtagtggatgcatgtcaatctacggccacaagtttgaggatgagaattttactgctaaacatactggaccaggattgctctccatggcaaatagtgggccaaacacaaatgggtgccagttcttcatcacttgtgcaaaatgcgattggcttgacaacaagcatgttgtctttgggagagtgcttggagatggtttgttggttatgcggaagattgagaacgtggctattggacccaataaccggcctaaacttgcggttgtaattactgagtgtggggagatgtgaaatgttttcgaatgttatgagagcccatagcttattagttttaaacttaggcattgtgacagaagccaaatcccattgtgggttatctaaaatgtcaacttcttacggcttacaaatactacagttgaggctatctatggccgttatgattgtattttaacaaaagctatttgc

SEQ ID NO: 33979 - protein, 199 aa, Arabidopsis thaliana
  misc_feature (1)..(199): Ceres Seq. ID no. 13604761
MNSGGGIVAAAAPSSGGGNVEWHVRPPNPKNPVVFFDVSIGGIPAGRIKMELFADIAPKTAENFRQFCTGELRKAGKPLGYKECQFHRVIKDFMVQSGDFLKNDGSGCMSIYGHKFEDENFTAKHTGPGLLSMANSGPNTNGCQFFITCAKCDWLDNKHVVFGRVLGDGLLVMRKIENVAIGPNNRPKLAVVITECGEM

SEQ ID NO: 33980 - protein, 173 aa, Arabidopsis thaliana
  misc_feature (1)..(173): Ceres Seq. ID no. 13604762
MLNGMSDHRTLKTQLSSSTSLLVVSPPVVSRWSSSPTLLPKPLKTSGSSVLVNSEKLESRLVTKNVSFTESSKILWFKVVIFLRMMVVDACQSTATSLRMRILLLNILDQDCSPWQIVGQTQMGASSSSLVQNAIGLTTSMLSLGECLEMVCWLCGRLRTWLLDPITGLNLRL

SEQ ID NO: 33981 - protein, 169 aa, Arabidopsis thaliana
  misc_feature (1)..(169): Ceres Seq. ID no. 13604763
MSDHRTLKTQLSSSTSLLVVSPPVVSRWSSSPTLLPKPLKTSGSSVLVNSEKLESRLVTKNVSFTESSKILWFKVVIFLRMMVVDACQSTATSLRMRILLLNILDQDCSPWQIVGQTQMGASSSSLVQNAIGLTTSMLSLGECLEMVCWLCGRLRTWLLDPITGLNLRL

SEQ ID NO: 33982 - DNA, 846 bp, Arabidopsis thaliana
  misc_feature (1)..(846): Ceres Seq. ID no. 13604768
ataaacaccagtcgcagcgtttcgtagaaaaattcgatttctctaaagccctaaaactaaaacgactatccccaattccaagttctagggtttccatcttccccaatctagtataaatggcggatacgccttcgagcccagctggagatggcggagaaagcggcggttccgttagggagcaggatcgataccttcctatagctaatatcagcaggatcatgaagaaagcgttgcctcctaatggtaagattggaaaagatgctaaggatacagttcaggaatgcgtctctgagttcatcagcttcatcactagcgaggccagtgataagtgtcaaaaagagaaaaggaaaactgtgaatggtgatgatttgttgtgggcaatggcaacattaggatttgaggattacctggaacctctaaagatatacctagcgaggtacagggagttggagggtgataataagggatcaggaaagagtggagatggatcaaatagagatgctggtggcggtgtttctggtgaagaaatgccgagctggtaaaagaagttgcaagtagtgattaagaacaatcgccaaatgatcaagggaaattagagatcagtgagttgtttatagttgagctgatcgacaactatttcgggtttactctcaatttcggttatgttagtttgaacgtttggtttattgtttccggtttagttggttgtatttaaagatttctctgttagatgttgagaacacttgaatgaaggaaaaatttgtccacatcctgttgttattttcgattcactttcggaatttcatagctaatttattctcatttaatacaaaatccttaaattaa

SEQ ID NO: 33983 - protein, 141 aa, Arabidopsis thaliana
  misc_feature (1)..(141): Ceres Seq. ID no. 13604769
MADTPSSPAGDGGESGGSVREQDRYLPIANISRIMKKALPPNGKIGKDAKDTVQECVSEFISFITSEASDKCQKEKRKTVNGDDLLWAMATLGFEDYLEPLKIYLARYRELEGDNKGSGKSGDGSNRDAGGGVSGEEMPSW

SEQ ID NO: 33984 - protein, 107 aa, Arabidopsis thaliana
  misc_feature (1)..(107): Ceres Seq. ID no. 13604770
MKKALPPNGKIGKDAKDTVQECVSEFISFITSEASDKCQKEKRKTVNGDDLLWAMATLGFEDYLEPLKIYLARYRELEGDNKGSGKSGDGSNRDAGGGVSGEEMPSW

SEQ ID NO: 33985 - DNA, 744 bp, Arabidopsis thaliana
  misc_feature (1)..(744): Ceres Seq. ID no. 13604791
cactcctctcatcacaatatatatattttccttttaacaaactataatttgaaattatttcaaattacgttttagggaaaattaatctttaatcatggcaaagatctcctttgcgcttgtcgttgtcgctcttattgtctttcaacaagtatctgaggctcatcgtccgatagatttcaacgaagaagtacttgaaaaggacttgcatgaagccaaggacttgatagaagaagacttgagagagaaagaaacgagcatcaggaacttggaaagcgaggttagtttgttaaccaaatctgagatgatgcttactcagctcgaacttgcttacaaaaatggtagaaatcttgagcatttcgggaaaaaactcaagaaattcaacaggaggatcaagcgggctcctgaggaagtgagatacgtttccatcatccagtccattttgaaggatttgggattaaacggagggagacattaaaaacaagaattagggtttgatgcgttcaaaggaggtttgatattcgcccatggagtttggctttacaagtgagaggagcaaaatcatttgcccatagtatatatatttatgtatttaattgcatcaattaaatgaaatgtattactatactaatattgtaatttgtatttttctttctttttttctgcgctgagattttgttaatttagttatctcgcaatgtatcttaaaatagttacaattaatataacagatactttttgtttttc

SEQ ID NO: 33986 - protein, 126 aa, Arabidopsis thaliana
  misc_feature (1)..(126): Ceres Seq. ID no. 13604792
MAKISFALVVVALIVFQQVSEAHRPIDFNEEVLEKDLHEAKDLIEEDLREKETSIRNLESEVSLLTKSEMMLTQLELAYKNGRNLEHFGKKLKKFNRRIKRAPEEVRYVSIIQSILKDLGLNGGRH

SEQ ID NO: 33987 - DNA, 1561 bp, Arabidopsis thaliana
  misc_feature (1)..(1561): Ceres Seq. ID no. 13604808
tgtttgggctcaatttgggctctgtctgttatccacaaattaagagacgcaaacctaaaacgacgccgttccatagttttcctttgaagaagagagagacgtcacaaaggaaagcactcaatcgtcatttcctcggtatctcctcctcgaaagaagaatgcctggaattagaggtccttcggaatactcgcaggaaccacctcgtcacccttctctcaaggtcaacgccaaggaacctttcaacgccgagcctccccgctcggccttagtctcatcttatgtcactcccgtcgaccttttctacaagcgaaatcatggtcccatccccattgttgatcaccttcaaagctactccgtcacccttactggattgatccagaacccgagaaagctctttatcaaagacatcaggtccctcccaaagtacaatgttactgctactcttcagtgtgccggtaacagaaggactgccatgagcaaagttaggaatgttagaggtgttggatgggatgtttctgctattggcaacgctgtctggggtggggcgaaactggccgatgttcttgagcttgtggggataccaaagctgactgcttctaccaatttaggagccagacatgttgagttcgttagtgttgatcgctgtaaggaggaaaatgggggcccttataaggcgtcaatcactctaagtcaagccacaaatcctgaagcggatgttctactcgcttatgagatgaatggagagaccctgaacagggatcacggatttccgttaagggtggttgtccctggtgtgattggtgctcgttcggtcaaatggcttgattccatcaatgtcatcgctgaagaaagccagggattcttcatgcaaaaagattacaaaatgtttccaccctctgtcaattgggataatatcaactggtcctctaggagaccgcaaatggatttccctgttcagagtgcaatctgctctgtggaggatgtgcaaatggtgaagcctggaaaggtaagtatcaaaggatatgcggtttcaggaggtggacgcgggatagaaagagtggacatatccctggatggaggcaaaaactgggtggaagcttctagaacgcaggaaccaggaaagcagtacatctcagaacacagctccagtgacaaatgggcatgggtgttgtttgaagccaccattgatgtttcacagactacagaggtcatcgccaaagcggttgattcggcggcgaatgttcaaccggaaaatgtggagtcggtgtggaacctaagaggggttctcaacacttcgtggcaccgtgtccttctccggcttggccactctaacttgtagaccaagttaccactatgcgtctggtctctctttatcttttctttaagaactaaaacatccttgaatatgcttgtccttgtggatctgtgagagcaaaatactgtttatagttaaataaaatgggaaaacccatctgttgtcatgtggtggattataaattatttatttatatgatagaactgttattcattattatatattaatgaaatcatatggttgagc

SEQ ID NO: 33988 - protein, 393 aa, Arabidopsis thaliana
  misc_feature (1)..(393): Ceres Seq. ID no. 13604809
MPGIRGPSEYSQEPPRHPSLKVNAKEPFNAEPPRSALVSSYVTPVDLFYKRNHGPIPIVDHLQSYSVTLTGLIQNPRKLFIKDIRSLPKYNVTATLQCAGNRRTAMSKVRNVRGVGWDVSAIGNAVWGGAKLADVLELVGIPKLTASTNLGARHVEFVSVDRCKEENGGPYKASITLSQATNPEADVLLAYEMNGETLNRDHGFPLRVVVPGVIGARSVKWLDSINVIAEESQGFFMQKDYKMFPPSVNWDNINWSSRRPQMDFPVQSAICSVEDVQMVKPGKVSIKGYAVSGGGRGIERVDISLDGGKNWVEASRTQEPGKQYISEHSSSDKWAWVLFEATIDVSQTTEVIAKAVDSAANVQPENVESVWNLRGVLNTSWHRVLLRLGHSNL

SEQ ID NO: 33989 - protein, 288 aa, Arabidopsis thaliana
  misc_feature (1)..(288): Ceres Seq. ID no. 13604810
MSKVRNVRGVGWDVSAIGNAVWGGAKLADVLELVGIPKLTASTNLGARHVEFVSVDRCKEENGGPYKASITLSQATNPEADVLLAYEMNGETLNRDHGFPLRVVVPGVIGARSVKWLDSINVIAEESQGFFMQKDYKMFPPSVNWDNINWSSRRPQMDFPVQSAICSVEDVQMVKPGKVSIKGYAVSGGGRGIERVDISLDGGKNWVEASRTQEPGKQYISEHSSSDKWAWVLFEATIDVSQTTEVIAKAVDSAANVQPENVESVWNLRGVLNTSWHRVLLRLGHSNL

SEQ ID NO: 33990 - protein, 201 aa, Arabidopsis thaliana
  misc_feature (1)..(201): Ceres Seq. ID no. 13604811
MNGETLNRDHGFPLRVVVPGVIGARSVKWLDSINVIAEESQGFFMQKDYKMFPPSVNWDNINWSSRRPQMDFPVQSAICSVEDVQMVKPGKVSIKGYAVSGGGRGIERVDISLDGGKNWVEASRTQEPGKQYISEHSSSDKWAWVLFEATIDVSQTTEVIAKAVDSAANVQPENVESVWNLRGVLNTSWHRVLLRLGHSNL

SEQ ID NO: 33991 - DNA, 1732 bp, Arabidopsis thaliana
  misc_feature (1)..(1732): Ceres Seq. ID no. 13604823
atggcagcaatcaccgttgactttcagctctgcttcatcttcatcctcctaggaatcttctcactcttctgtctctctgctttcttcttcaagaaaccaaaagacccacaacttcaaggctgtggtctacctccgagcccaccctctctaccggtcataggtcatcttcaccttctcctctctgttccatgtcacaaatcctttcagaaactctcctccaagtatggtcccctccttcaccttcgtgcattcaatatcccaatagttatagtctcttccggctccatggccaacgaagttttgaggacccaagacctgaactttgctacccgtcaacgtgaggtttctataatggaaaaatcattactttttggatcttttggctttgtctcagctccttatggagattactggagattcatgaagaagctcttagtcacaaaccttttcgggtctcattccctcgagcagacacggctcattcgtgagaaagaactcaagactttccgtactatgttgttcgataaggcggcaaagaaggggacagttgatgttggtaaagagatgatgaagctaacgaataacagcatttgcaggatgataatggggaggaggtgttcagaggagaacagtgaagcagagaaagtcgaagacttggtgatcaaatcatttagtttggtgaagaaggtccttatagctaacacggttggtcgacttctcaagaagtttgggatctctctgtttgagaaggaaatcatggaggtctcgcagaggtacgatgaattgctggaaaaaattattaaagaacacgaagaggatccgaacaagaaagaggatagagacatgatggatgttctgttggaagtttgtgcagacgacaaggctgaggttaagattaccaggaaccaaatcaaagcgcttattgtggagcttttccttggaggcactgatacttcagcacaaacaatacagtggataatggccgaactcattaaccatcccgagattcttaaaatattaagagaagagatagaatctgttgtcggaacaacgaggtttattcaagaaacagatctctcaaacctgccgtatttgcaggctgtgatgaaagaaggacaaagactacacccacattcgccaatgttggtgaggaatgcaaccaaaggatgcaagattggagggtactacataccgcagaacacaacgatgctaataaacacctatgcgatgatgatagatccagattcatgggaaaatccagacaagtttcagcccgagaggttcatggtgtctccttcaaaagggaaagacgatgagagagaacagctagctttgaacttcattcctttcgggagcggaagaagagcatgtccaggagaaaaattgggctatctcttcactggagtagccattggaacaatggtacagtgttttgactggataatcgatggagataaggttaacgtggaagaggctggagaaatgacgctgaccatggctcatccacttaaatgcactcctgtgactcgagttaacccattagctagctttgaatctgaagatcctaagtggttgatggaggagtttgatatgtattgttgaagttgcagacatatgtctgaaactaataatggaacatgctgtctttgttttttcatatggagtttgatcactaatattgttgtttcataacagaacttgttgtctttatgtatttctgctgtttcacaac

SEQ ID NO: 33992 - protein, 533 aa, Arabidopsis thaliana
  misc_feature (1)..(533): Ceres Seq. ID no. 13604824
MAAITVDFQLCFIFILLGIFSLFCLSAFFFKKPKDPQLQGCGLPPSPPSLPVIGHLHLLLSVPCHKSFQKLSSKYGPLLHLRAFNIPIVIVSSGSMANEVLRTQDLNFATRQREVSIMEKSLLFGSFGFVSAPYGDYWRFMKKLLVTNLFGSHSLEQTRLIREKELKTFRTMLFDKAAKKGTVDVGKEMMKLTNNSICRMIMGRRCSEENSEAEKVEDLVIKSFSLVKKVLIANTVGRLLKKFGISLFEKEIMEVSQRYDELLEKIIKEHEEDPNKKEDRDMMDVLLEVCADDKAEVKITRNQIKALIVELFLGGTDTSAQTIQWIMAELINHPEILKILREEIESVVGTTRFIQETDLSNLPYLQAVMKEGQRLHPHSPMLVRNATKGCKIGGYYIPQNTTMLINTYAMMIDPDSWENPDKFQPERFMVSPSKGKDDEREQLALNFIPFGSGRRACPGEKLGYLFTGVAIGTMVQCFDWIIDGDKVNVEEAGEMTLTMAHPLKCTPVTRVNPLASFESEDPKWLMEEFDMYC

SEQ ID NO: 33993 - protein, 438 aa, Arabidopsis thaliana
  misc_feature (1)..(438): Ceres Seq. ID no. 13604825
MANEVLRTQDLNFATRQREVSIMEKSLLFGSFGFVSAPYGDYWRFMKKLLVTNLFGSHSLEQTRLIREKELKTFRTMLFDKAAKKGTVDVGKEMMKLTNNSICRMIMGRRCSEENSEAEKVEDLVIKSFSLVKKVLIANTVGRLLKKFGISLFEKEIMEVSQRYDELLEKIIKEHEEDPNKKEDRDMMDVLLEVCADDKAEVKITRNQIKALIVELFLGGTDTSAQTIQWIMAELINHPEILKILREEIESVVGTTRFIQETDLSNLPYLQAVMKEGQRLHPHSPMLVRNATKGCKIGGYYIPQNTTMLINTYAMMIDPDSWENPDKFQPERFMVSPSKGKDDEREQLALNFIPFGSGRRACPGEKLGYLFTGVAIGTMVQCFDWIIDGDKVNVEEAGEMTLTMAHPLKCTPVTRVNPLASFESEDPKWLMEEFDMYC

SEQ ID NO: 33994 - protein, 416 aa, Arabidopsis thaliana
  misc_feature (1)..(416): Ceres Seq. ID no. 13604826
MEKSLLFGSFGFVSAPYGDYWRFMKKLLVTNLFGSHSLEQTRLIREKELKTFRTMLFDKAAKKGTVDVGKEMMKLTNNSICRMIMGRRCSEENSEAEKVEDLVIKSFSLVKKVLIANTVGRLLKKFGISLFEKEIMEVSQRYDELLEKIIKEHEEDPNKKEDRDMMDVLLEVCADDKAEVKITRNQIKALIVELFLGGTDTSAQTIQWIMAELINHPEILKILREEIESVVGTTRFIQETDLSNLPYLQAVMKEGQRLHPHSPMLVRNATKGCKIGGYYIPQNTTMLINTYAMMIDPDSWENPDKFQPERFMVSPSKGKDDEREQLALNFIPFGSGRRACPGEKLGYLFTGVAIGTMVQCFDWIIDGDKVNVEEAGEMTLTMAHPLKCTPVTRVNPLASFESEDPKWLMEEFDMYC

SEQ ID NO: 33995 - DNA, 2117 bp, Arabidopsis thaliana
  misc_feature (1)..(2117): Ceres Seq. ID no. 13604839
agcttagcaaaattcttctgaatgaataatcggcgattatgtctttgaaaaacgatgcgagtagtagccacgacggtggaagcaacagagaaagcgtaatcgatgatcatggccgccgtaaaagcacttgcggctactgtaaatccccagctcggtccagtatctctcacggtttatcagcacagactcttaccgtttatgactaccaagctcttattgaccgaggctggagaagatctggtacttatctttacaaacatgagatggataaaacgtgttgccctccttatacgatacgtttgaaagcaagtgattttgttcctactaaagagcagcagcgagtttctagaagactagaaaggttcttggatggcaaactagatgtgcagcccagggaacaaagaggtgcttcttcctctggtgatgtttcagatacaaggagaaaaacacttggagctgctaaaagtgaagagaataagaaagttgaagcagttatggatgatttgtctaaaaatattgaccaagctgtgcaattatgcatacggagtggggaattcccgtctaatatgcagataccaaaagcttcagtgaagaaggttttctgtgctagaagaaagaaactagctgaaggaacagaacaaatcttatacaccagcaacattgcttttccaatagcagctgcaataaaacgcatccagacatctgagaaagaggggataaatagtgcagaaggaaatagattatcacctgaaactatttctgagatgttgttgagtgcaatgcataaggtgggggaaactcctgatgtgtctatcaaagtctgtaagggccatatcaatttcctttcatctgccaaagattctttttctgatagagatgttgtacctaatggtaacatctcgagaggagccaattctttagatggaagtgaaacccttcacgctaagaaggattcagaaaaccatcaggcaagaaagcgaaagctggagatacatttgaaaaggtctagttttgatcctgaagaacatgagttatacaaacggtatcagctgaaagtgcacaatgataagccagggcacgttgtagaaagttcatacagaaggtttttggtcgactctcctttaatagatgttcaaccttcaggtgatgaaaaggttccgccttgtggcttcggctctttccaccaacaatatagaattgatggccgcctaattgccgtcggggttgtagacattcttcctaaatgtttgtcaagtgtatacttattctgggatccagactatgcattcttatcgctcggaaaatattctgccattcaagaaattaattgggttatagagaaccaagctcgctgcccttctcttcagtattactatcttggttattatatacattcctgcagcaagatgagatataaagcagcctatcgtccatctgagcttctatgtcctctccgtttccagtgggttccatttgaagtagcaaggccgatgcttgataaaaagccatatgtcatattgtccgatattgctatttcacataatcaatgttctttactagctggtgcttctgaaactctcgtggaaccagcagcaagtgaacatgaagacatggaacaaggggagacgaatgataactttatgggctgcagtgatgaggatgaagatgaggatgaggatgatgatgatgatgatgatgatgatgaggaaatgtatgagactgaatcagaggactctcatattgagtcagaccctggatccaaagataacgacattaacaacatccttatcggtctttatggatcccaatatagatacaaggaaatgcggcagatcataactcccgtaggcaggaagcaactggaaccgatgttacaaagctaccgcaaggttgtgggcgctgagctttcagagagaatggtgtatgaaatcaactgaagcttcaacaataccaagctccattgagctttggtaccattagtcattagataaaactcaaaattgtttgtattcatgtttcagttgttgtatatctatgactatgagacttgtacatggtgtctttctttaagtttgtattttctgattacctttatattgaaaaaatttctgtccaag

SEQ ID NO: 33996 - protein, 632 aa, Arabidopsis thaliana
  misc_feature (1)..(632): Ceres Seq. ID no. 13604840
MSLKNDASSSHDGGSNRESVIDDHGRRKSTCGYCKSPARSSISHGLSAQTLTVYDYQALIDRGWRRSGTYLYKHEMDKTCCPPYTIRLKASDFVPTKEQQRVSRRLERFLDGKLDVQPREQRGASSSGDVSDTRRKTLGAAKSEENKKVEAVMDDLSKNIDQAVQLCIRSGEFPSNMQIPKASVKKVFCARRKKLAEGTEQILYTSNIAFPIAAAIKRIQTSEKEGINSAEGNRLSPETISEMLLSAMHKVGETPDVSIKVCKGHINFLSSAKDSFSDRDVVPNGNISRGANSLDGSETLHAKKDSENHQARKRKLEIHLKRSSFDPEEHELYKRYQLKVHNDKPGHVVESSYRRFLVDSPLIDVQPSGDEKVPPCGFGSFHQQYRIDGRLIAVGVVDILPKCLSSVYLFWDPDYAFLSLGKYSAIQEINWVIENQARCPSLQYYYLGYYIHSCSKMRYKAAYRPSELLCPLRFQWVPFEVARPMLDKKPYVILSDIAISHNQCSLLAGASETLVEPAASEHEDMEQGETNDNFMGCSDEDEDEDEDDDDDDDDDEEMYETESEDSHIESDPGSKDNDINNILIGLYGSQYRYKEMRQIITPVGRKQLEPMLQSYRKVVGAELSERMVYEIN

SEQ ID NO: 33997 - protein, 557 aa, Arabidopsis thaliana
  misc_feature (1)..(557): Ceres Seq. ID no. 13604841
MDKTCCPPYTIRLKASDFVPTKEQQRVSRRLERFLDGKLDVQPREQRGASSSGDVSDTRRKTLGAAKSEENKKVEAVMDDLSKNIDQAVQLCIRSGEFPSNMQIPKASVKKVFCARRKKLAEGTEQILYTSNIAFPIAAAIKRIQTSEKEGINSAEGNRLSPETISEMLLSAMHKVGETPDVSIKVCKGHINFLSSAKDSFSDRDVVPNGNISRGANSLDGSETLHAKKDSENHQARKRKLEIHLKRSSFDPEEHELYKRYQLKVHNDKPGHVVESSYRRFLVDSPLIDVQPSGDEKVPPCGFGSFHQQYRIDGRLIAVGVVDILPKCLSSVYLFWDPDYAFLSLGKYSAIQEINWVIENQARCPSLQYYYLGYYIHSCSKMRYKAAYRPSELLCPLRFQWVPFEVARPMLDKKPYVILSDIAISHNQCSLLAGASETLVEPAASEHEDMEQGETNDNFMGCSDEDEDEDEDDDDDDDDDEEMYETESEDSHIESDPGSKDNDINNILIGLYGSQYRYKEMRQIITPVGRKQLEPMLQSYRKVVGAELSERMVYEIN

SEQ ID NO: 33998 - protein, 480 aa, Arabidopsis thaliana
  misc_feature (1)..(480): Ceres Seq. ID no. 13604842
MDDLSKNIDQAVQLCIRSGEFPSNMQIPKASVKKVFCARRKKLAEGTEQILYTSNIAFPIAAAIKRIQTSEKEGINSAEGNRLSPETISEMLLSAMHKVGETPDVSIKVCKGHINFLSSAKDSFSDRDVVPNGNISRGANSLDGSETLHAKKDSENHQARKRKLEIHLKRSSFDPEEHELYKRYQLKVHNDKPGHVVESSYRRFLVDSPLIDVQPSGDEKVPPCGFGSFHQQYRIDGRLIAVGVVDILPKCLSSVYLFWDPDYAFLSLGKYSAIQEINWVIENQARCPSLQYYYLGYYIHSCSKMRYKAAYRPSELLCPLRFQWVPFEVARPMLDKKPYVILSDIAISHNQCSLLAGASETLVEPAASEHEDMEQGETNDNFMGCSDEDEDEDEDDDDDDDDDEEMYETESEDSHIESDPGSKDNDINNILIGLYGSQYRYKEMRQIITPVGRKQLEPMLQSYRKVVGAELSERMVYEIN

SEQ ID NO: 33999 - DNA, 951 bp, Arabidopsis thaliana
  misc_feature (1)..(951): Ceres Seq. ID no. 13604843
atggcgattgatacgatacaaaaaacaaaaaagcttcggtggggagaaattgacgaagaagaaggcgactatgatttccttcttccgcctaagcagatgattagtccggaccagaacggtgtaaagaaggtgattgagtacaaattcaacgaagaggacaaaaaggtcaaaatcactaccacgacccgtgttcagaagcgagctctcaccaaacaagccgtggagcgacggagctggaataagttcggagacgcagctcatgaagaatccagtagttacctcacaatgcgttcaacagaggatatcatcttggaacgaattagagctcctggtagcaacgcggaacagtcgaccgtatcaggagatagcatgtctcagttgggcaaaccgggtgcggtcctcatggtctgcaggttatgccaaaagaaaggtgaccactggacatcaagatgcccacagaaggatctcttatccttaatggacgagcctttaacagcagaaacttctacatcgaccataactggaactggcagggcggcttatgtcccgccaagcatgagagaaggtgcagacagaaaagctggtggttcagacatgaggagtagacatgatgagaactctgtccgtgtgactaatttgtctgaagatacccgtggaccagatttgatggagttgtttcgtccgtttggtgctgtaacccgttgtcatgtagccattgatcagaagacaagcatgagcagaggatttggttttgtcagttttgtgagcagggaagatgcacagcgagcaatcaacaaattgaatggctatggttatgataacctcattcttagggttgaatggtccactcctaaaacccaattagatccgttttcattcgctgattataataatctttgtaagttgttgaatatatgtcattcatgattataagttctcgcgaagggtggg

SEQ ID NO: 34000 - protein, 308 aa, Arabidopsis thaliana
  misc_feature (1)..(308): Ceres Seq. ID no. 13604844
MAIDTIQKTKKLRWGEIDEEEGDYDFLLPPKQMISPDQNGVKKVIEYKFNEEDKKVKITTTTRVQKRALTKQAVERRSWNKFGDAAHEESSSYLTMRSTEDIILERIRAPGSNAEQSTVSGDSMSQLGKPGAVLMVCRLCQKKGDHWTSRCPQKDLLSLMDEPLTAETSTSTITGTGRAAYVPPSMREGADRKAGGSDMRSRHDENSVRVTNLSEDTRGPDLMELFRPFGAVTRCHVAIDQKTSMSRGFGFVSFVSREDAQRAINKLNGYGYDNLILRVEWSTPKTQLDPFSFADYNNLCKLLNICHS

SEQ ID NO: 34001 - protein, 276 aa, Arabidopsis thaliana
  misc_feature (1)..(276): Ceres Seq. ID no. 13604845
MISPDQNGVKKVIEYKFNEEDKKVKITTTTRVQKRALTKQAVERRSWNKFGDAAHEESSSYLTMRSTEDIILERIRAPGSNAEQSTVSGDSMSQLGKPGAVLMVCRLCQKKGDHWTSRCPQKDLLSLMDEPLTAETSTSTITGTGRAAYVPPSMREGADRKAGGSDMRSRHDENSVRVTNLSEDTRGPDLMELFRPFGAVTRCHVAIDQKTSMSRGFGFVSFVSREDAQRAINKLNGYGYDNLILRVEWSTPKTQLDPFSFADYNNLCKLLNICHS

SEQ ID NO: 34002 - protein, 213 aa, Arabidopsis thaliana
  misc_feature (1)..(213): Ceres Seq. ID no. 13604846
MRSTEDIILERIRAPGSNAEQSTVSGDSMSQLGKPGAVLMVCRLCQKKGDHWTSRCPQKDLLSLMDEPLTAETSTSTITGTGRAAYVPPSMREGADRKAGGSDMRSRHDENSVRVTNLSEDTRGPDLMELFRPFGAVTRCHVAIDQKTSMSRGFGFVSFVSREDAQRAINKLNGYGYDNLILRVEWSTPKTQLDPFSFADYNNLCKLLNICHS

SEQ ID NO: 34003 - DNA, 1103 bp, Arabidopsis thaliana
  misc_feature (1)..(1103): Ceres Seq. ID no. 13604847
atccaaaaccaaaagggagagactaagaatggggtcactaggagaagaaccacaagtagcagaagactgcatgggtttgcttcaactcctaagcaacggtaccgttttgagatccgagagcattgaccttattacccaacaaatcccattcaaaaacaaccaaaccgttctcttcaaagactcaatctatcacaaacctaacaaccttcacctccgtctctacaaacccatttccgcctccaaccgtaccgctctccctgtcgtggtcttcttccacggcgggggcttctgcttcgggtcacgttcttggcctcactttcacaacttctgtctaactcttgcatcgtcccttaacgcccttgtcgtctcacctgactaccggttagcacccgaacaccgcctcccggctgcctttgaggatgctgaggcggtgcttacatggctctgggaccaagctgtttccgatggtgtgaaccactggtttgaagatggaacagacgttgactttgacagggtttttgttgttggtgattcatccggtgggaacatagctcatcaactcgctgtccggttcggatccggttcaatcgagttgacaccggttcgggtacgcggttacgttcttatgggaccgttttttggcggggaagagaggactaactccgagaatggcccctctgaagctttgctcagcttggatttgcttgacaagttttggagattgtcactaccaaacggtgcaacaagagatcaccacatggctaacccttttggaccaacgagtcctacactcgaatcaattagcttagagccaatgttggtgattgtcggcggctcagaactcttgagagatagggccaaggaatatgcatataaattaaagaagatgggaggaaaaagggtagattacattgaattcgaaaacaaggagcatggtttctactccaactatccatcttccgaggctgcggaacaagttctccgtatcattggagactttatgaacaacttgtcttaagtattttagcatttggcttgttgaaggtaattaagtgtttaattcaattaggattccatctcaataatattaagtttgcttggtg

SEQ ID NO: 34004 - protein, 338 aa, Arabidopsis thaliana
  misc_feature (1)..(338): Ceres Seq. ID no. 13604848
SKTKRERLRMGSLGEEPQVAEDCMGLLQLLSNGTVLRSESIDLITQQIPFKNNQTVLFKDSIYHKPNNLHLRLYKPISASNRTALPVVVFFHGGGFCFGSRSWPHFHNFCLTLASSLNALVVSPDYRLAPEHRLPAAFEDAEAVLTWLWDQAVSDGVNHWFEDGTDVDFDRVFVVGDSSGGNIAHQLAVRFGSGSIELTPVRVRGYVLMGPFFGGEERTNSENGPSEALLSLDLLDKFWRLSLPNGATRDHHMANPFGPTSPTLESISLEPMLVIVGGSELLRDRAKEYAYKLKKMGGKRVDYIEFENKEHGFYSNYPSSEAAEQVLRIIGDFMNNLS

SEQ ID NO: 34005 - protein, 329 aa, Arabidopsis thaliana
  misc_feature (1)..(329): Ceres Seq. ID no. 13604849
MGSLGEEPQVAEDCMGLLQLLSNGTVLRSESIDLITQQIPFKNNQTVLFKDSIYHKPNNLHLRLYKPISASNRTALPVVVFFHGGGFCFGSRSWPHFHNFCLTLASSLNALVVSPDYRLAPEHRLPAAFEDAEAVLTWLWDQAVSDGVNHWFEDGTDVDFDRVFVVGDSSGGNIAHQLAVRFGSGSIELTPVRVRGYVLMGPFFGGEERTNSENGPSEALLSLDLLDKFWRLSLPNGATRDHHMANPFGPTSPTLESISLEPMLVIVGGSELLRDRAKEYAYKLKKMGGKRVDYIEFENKEHGFYSNYPSSEAAEQVLRIIGDFMNNLS

SEQ ID NO: 34006 - protein, 315 aa, Arabidopsis thaliana
  misc_feature (1)..(315): Ceres Seq. ID no. 13604850
MGLLQLLSNGTVLRSESIDLITQQIPFKNNQTVLFKDSIYHKPNNLHLRLYKPISASNRTALPVVVFFHGGGFCFGSRSWPHFHNFCLTLASSLNALVVSPDYRLAPEHRLPAAFEDAEAVLTWLWDQAVSDGVNHWFEDGTDVDFDRVFVVGDSSGGNIAHQLAVRFGSGSIELTPVRVRGYVLMGPFFGGEERTNSENGPSEALLSLDLLDKFWRLSLPNGATRDHHMANPFGPTSPTLESISLEPMLVIVGGSELLRDRAKEYAYKLKKMGGKRVDYIEFENKEHGFYSNYPSSEAAEQVLRIIGDFMNNLS

SEQ ID NO: 34007 - DNA, 1126 bp, Arabidopsis thaliana
  misc_feature (1)..(1126): Ceres Seq. ID no. 13604855
catcaaaattcaaaaccaacaccatggataagacagcgacattgtgtctcttgttcttgttcacattcctcacgacctgtttgtctaaagatctctgtaaccaaaatgacaaaaacaccctcctcaagatcaagaaatctctaaacaacccttatcacctcgcttcatgggaccctcaaaccgactgttgctcctggtactgccttgagtgcggcgacgccaccgttaaccaccgtgttaccgccttaaccatattctccggccagatctccggtcagatcccggctgaagtcggtgacttgccgtatcttgagacccttgtcttccgcaaactctctaacctcaccggtacaatccaacccaccatcgccaaactcaagaacctccgaatgctcaggctcagctggacgaatctgacaggtccaattcctgactttataagtcagctcaagaatctcgagttcttagaactttccttcaatgatctctctggttccattccaagttctctctctacgttacctaaaatcttggctcttgaacttagcaggaacaaacttacaggttccataccagagtcatttgggtcgtttccaggaacagtccctgaccttcgcctatcacataaccagctctccggtccaatacccaaatcattaggcaacatcgactttaaccggatcgatttatcccgcaacaagctccaaggtgatgcttcgatgttgtttggttccaacaaaacaacctggtctattgacttatcaagaaacatgttccagttcgatatctcaaaggttgatatccctaaaacacttggtatcttggacttgaaccacaatgggatcactgggaatattccggtgcagtggactgaagctcctcttcagttcttcaatgttagctacaacaaactgtgtggacacatcccaactggagggaaacttcagacatttgattcttattcctattttcacaacaagtgtttgtgtggtgctcctcttgaaatttgcaagtaaaccaagcttatctctaggattacgaaaaaatatatttgagtcaataatatagacaaatatgtaatgttattcggattgattaataaaacatgaaccaaacctctcatttg

SEQ ID NO: 34008 - protein, 337 aa, Arabidopsis thaliana
  misc_feature (1)..(337): Ceres Seq. ID no. 13604856
SKFKTNTMDKTATLCLLFLFTFLTTCLSKDLCNQNDKNTLLKIKKSLNNPYHLASWDPQTDCCSWYCLECGDATVNHRVTALTIFSGQISGQIPAEVGDLPYLETLVFRKLSNLTGTIQPTIAKLKNLRMLRLSWTNLTGPIPDFISQLKNLEFLELSFNDLSGSIPSSLSTLPKILALELSRNKLTGSIPESFGSFPGTVPDLRLSHNQLSGPIPKSLGNIDFNRIDLSRNKLQGDASMLFGSNKTTWSIDLSRNMFQFDISKVDIPKTLGILDLNHNGITGNIPVQWTEAPLQFFNVSYNKLCGHIPTGGKLQTFDSYSYFHNKCLCGAPLEICK

SEQ ID NO: 34009 - protein, 330 aa, Arabidopsis thaliana
  misc_feature (1)..(330): Ceres Seq. ID no. 13604857
MDKTATLCLLFLFTFLTTCLSKDLCNQNDKNTLLKIKKSLNNPYHLASWDPQTDCCSWYCLECGDATVNHRVTALTIFSGQISGQIPAEVGDLPYLETLVFRKLSNLTGTIQPTIAKLKNLRMLRLSWTNLTGPIPDFISQLKNLEFLELSFNDLSGSIPSSLSTLPKILALELSRNKLTGSIPESFGSFPGTVPDLRLSHNQLSGPIPKSLGNIDFNRIDLSRNKLQGDASMLFGSNKTTWSIDLSRNMFQFDISKVDIPKTLGILDLNHNGITGNIPVQWTEAPLQFFNVSYNKLCGHIPTGGKLQTFDSYSYFHNKCLCGAPLEICK

SEQ ID NO: 34010 - protein, 208 aa, Arabidopsis thaliana
  misc_feature (1)..(208): Ceres Seq. ID no. 13604858
MLRLSWTNLTGPIPDFISQLKNLEFLELSFNDLSGSIPSSLSTLPKILALELSRNKLTGSIPESFGSFPGTVPDLRLSHNQLSGPIPKSLGNIDFNRIDLSRNKLQGDASMLFGSNKTTWSIDLSRNMFQFDISKVDIPKTLGILDLNHNGITGNIPVQWTEAPLQFFNVSYNKLCGHIPTGGKLQTFDSYSYFHNKCLCGAPLEICK

SEQ ID NO: 34011 - DNA, 1500 bp, Arabidopsis thaliana
  misc_feature (1)..(1500): Ceres Seq. ID no. 13604867
accgaccactgtactgaatctttaagcctctcaacgtgttttttatatatattttgaaaatcttttacgccttaaaaggatctacgataattaaaaaaaaatggcaacggaatgcattgcaacggtccctcaaatattcagtgaaaacaaaaccaaagaggattcttcgatcttcgatgcaaagctccttaatcagcactcgcaccacatacctcaacagttcgtatggcccgaccacgagaaaccttctacggatgttcaacctctccaagtcccactcatagacctagccggtttcctctccggcgactcgtgcttggcatcggaggctactagactcgtctcaaaggctgcaacgaaacatggcttcttcctaatcactaaccatggtgtcgatgagagcctcttgtctcgtgcctatctgcatatggactctttctttaaggccccggcttgtgagaagcagaaggctcagaggaagtggggtgagagctccggttacgctagtagtttcgtcgggagattctcctcaaagctcccgtggaaggagactctgtcgtttaagttctctcccgaggagaagatccattcccaaaccgttaaagactttgtttctaagaaaatgggcgatggatacgaagatttcgggaaggtttatcaagaatacgcggaggccatgaacactctctcactaaagatcatggagcttcttggaatgagtcttggggtcgagaggagatattttaaagagtttttcgaagacagcgattcaatattccggttgaattactacccgcagtgcaagcaaccggagcttgcactagggacaggaccccactgcgacccaacatctctaaccatacttcatcaagaccaagttggcggtctgcaagttttcgtggacaacaaatggcaatccattcctcctaaccctcacgctttcgtggtgaacataggcgacaccttcatggctctaacgaatggaagatacaagagttgtttgcatcgggcggtggtgaacagcgagagagaaaggaagacgtttgcattcttcctatgtccgaaaggggaaaaagtggtgaagccaccagaagaactagtaaacggagtgaagtctggtgaaagaaagtatcctgattttacgtggtctatgtttcttgagttcacacagaagcattatagggcagacatgaacactcttgacgagttctcaatttggcttaagaacagaagaagtttctaaaattgaggagacaatgttgtggtccagaaggtcacttgtagttatgtatagagctttcactgtttttcttaagatgttcaagacttgttaaggatcggagactttttttgttcttttattatcttgctctaggttgtctggtgttaaataaaagtagcaaaaaaataaaaatatatgtactccattgggtctacttatgatttgtttcgaaatggtttttttatagtctctaatgttaaatttatgtcactattact

SEQ ID NO: 34012 - protein, 380 aa, Arabidopsis thaliana
  misc_feature (1)..(380): Ceres Seq. ID no. 13604868
MATECIATVPQIFSENKTKEDSSIFDAKLLNQHSHHIPQQFVWPDHEKPSTDVQPLQVPLIDLAGFLSGDSCLASEATRLVSKAATKHGFFLITNHGVDESLLSRAYLHMDSFFKAPACEKQKAQRKWGESSGYASSFVGRFSSKLPWKETLSFKFSPEEKIHSQTVKDFVSKKMGDGYEDFGKVYQEYAEAMNTLSLKIMELLGMSLGVERRYFKEFFEDSDSIFRLNYYPQCKQPELALGTGPHCDPTSLTILHQDQVGGLQVFVDNKWQSIPPNPHAFVVNIGDTFMALTNGRYKSCLHRAVVNSERERKTFAFFLCPKGEKVVKPPEELVNGVKSGERKYPDFTWSMFLEFTQKHYRADMNTLDEFSIWLKNRRSF

SEQ ID NO: 34013 - protein, 271 aa, Arabidopsis thaliana
  misc_feature (1)..(271): Ceres Seq. ID no. 13604869
MDSFFKAPACEKQKAQRKWGESSGYASSFVGRFSSKLPWKETLSFKFSPEEKIHSQTVKDFVSKKMGDGYEDFGKVYQEYAEAMNTLSLKIMELLGMSLGVERRYFKEFFEDSDSIFRLNYYPQCKQPELALGTGPHCDPTSLTILHQDQVGGLQVFVDNKWQSIPPNPHAFVVNIGDTFMALTNGRYKSCLHRAVVNSERERKTFAFFLCPKGEKVVKPPEELVNGVKSGERKYPDFTWSMFLEFTQKHYRADMNTLDEFSIWLKNRRSF

SEQ ID NO: 34014 - protein, 206 aa, Arabidopsis thaliana
  misc_feature (1)..(206): Ceres Seq. ID no. 13604870
MGDGYEDFGKVYQEYAEAMNTLSLKIMELLGMSLGVERRYFKEFFEDSDSIFRLNYYPQCKQPELALGTGPHCDPTSLTILHQDQVGGLQVFVDNKWQSIPPNPHAFVVNIGDTFMALTNGRYKSCLHRAVVNSERERKTFAFFLCPKGEKVVKPPEELVNGVKSGERKYPDFTWSMFLEFTQKHYRADMNTLDEFSIWLKNRRSF

SEQ ID NO: 34015 - DNA, 864 bp, Arabidopsis thaliana
  misc_feature (1)..(864): Ceres Seq. ID no. 13604873
atgttattttcgtcgtgcaaaataattttccaatataccctcaaggaaatgtcatcccacggccgagaagtagaggtgaccatctcatcggcaaaggatatcaagaacgtgaactggcgcaacggcccaaacaagccatacgccgttgtatggatcgatccgaagttcaaatcctccacaagagttgacgaagacggcaacacttgtacaacgtggaacgagacatttgtcatcgctttacctccggccaacgacgatgacgacaaggtatacatcaacatcgtacacgcaggccgtgaagagaacacaaagcccctcatcggctccgcccatctcagcctccgtgatgtcattgatgacgtcggcttcggcgtccccttcatgaaaaccctcaagctcaaacgcccctctggccgacctcagggcaaactcgacgtcactgtcaccgttcgagagactccaggatcaaattacgcgcttccttatggcgatccatacgcgccggaaaaggggagcaagttcggtgggatggggactggactggcggtcggggcggtggccggagttttgggtggggtggcattagcggagggactggaggctgtggaaggcgatgaggatgatgatgatgacgatgatgctgctgctgctgctgctgctgatgatgatgatgatgatgatgatgatgatgatgatgatgacgagtgagactttgagtttacagctatatcatctttcattggtgaagtcctgaattctgtgttgcaacataacaagcctaataacttcgattgaaaaacaagtaactcacattaatgttcgggtaagacttcacagaaaataatgcaaaggattgatatattc

SEQ ID NO: 34016 - protein, 235 aa, Arabidopsis thaliana
  misc_feature (1)..(235): Ceres Seq. ID no. 13604874
MLFSSCKIIFQYTLKEMSSHGREVEVTISSAKDIKNVNWRNGPNKPYAVVWIDPKFKSSTRVDEDGNTCTTWNETFVIALPPANDDDDKVYINIVHAGREENTKPLIGSAHLSLRDVIDDVGFGVPFMKTLKLKRPSGRPQGKLDVTVTVRETPGSNYALPYGDPYAPEKGSKFGGMGTGLAVGAVAGVLGGVALAEGLEAVEGDEDDDDDDDAAAAAAADDDDDDDDDDDDDDE

SEQ ID NO: 34017 - protein, 219 aa, Arabidopsis thaliana; identical to SEQ ID NO: 30148
  misc_feature (1)..(219): Ceres Seq. ID no. 13604875

SEQ ID NO: 34018 - DNA, 1756 bp, Arabidopsis thaliana
  misc_feature (1)..(1756): Ceres Seq. ID no. 13604876
ccacgcgtccggcaatgacttacgcgtggttatggacgcttctcgcctttgttctgacatggatggtttttcacctcatcaagatgaagaaggcggcaaccggagatttagaggccgaggcagaagcaagaagagatggtgcaacggatgtcatcattgttggggcgggtgttgcaggcgcttctcttgcttatgctttagctaaggatggacgacgagtacatgtgatagagagggacttaaaagagccacaaagattcatgggagagctgatgcaagcgggaggtcgcttcatgttagcccagcttggcctcgaagattgtttggaggacatagacgcacaagaagcgaagtccttggcaatatacaaggatggaaaacacgcgacattgccttttccagatgacaagagttttcctcatgagccagtaggtagactcttacgtaatggtcggctggtacaacgtttacgccaaaaagcagcttctcttagcaatgttcaattagaagaaggaacagtgaagtctttaattgaagaagaaggagtggtcaaaggagtgacatacaaaaatagcgcaggcgaagaaataacggcctttgcacctcttactgtcgtatgcgatggttgttattcgaaccttcgtcggtcactcgtggataatactgaggaagtcctctcgtacatggtgggttacgtcacgaagaatagccgacttgaagatccccatagtctacatttgatattttctaaacctttggtttgtgttatatatcaaataaccagtgatgaagttcgttgtgttgccgaagttcccgctgatagtattccttctatatcgaatggtgaaatgtctaccttcctcaagaaatcaatggctcctcagatacctgaaactggaaatcttcgggagatatttttgaaaggcatagaggaaggattaccagagataaaatcaacagcgacgaaaagtatgtcatcgagattgtgtgataaaagaggagtgattgtgttgggagatgcattcaatatgcgtcatcctataatcgcgtcaggaatgatggttgcactctcggacatttgcattctacgcaatcttctcaaaccattgcctaacctcagcaatactaagaaagtctctgatcttgtcaagtccttttacatcatccgcaagccaatgtcagcgaccgtgaacacgctcgcgagtatcttttcacaagtgcttgttgctacaacagacgaagcaagagagggaatgcgacaaggctgcttcaattacctagctcgtggagattttaaaacaaggggattgatgactattctcggaggcatgaaccctcaccctcttactctagtccttcatcttgtagccatcacccttacgtccatgggccacttgctctctccgtttccttcgcctcgtcgcttttggcatagcctcagaattcttgcctgggctttgcaaatgttgggtgcacatttagtggatgaaggattcaaggaaatgttgattccaacaaacgcagctgcttatcgaaggaactatatcgccacaaccactgtttgatcaatccataacacgaagactgttttattcggagatgaaaaataacaactcaaacagttaactttctacaaccaaataaataattgtgtgtatatgaagttgagcctatggttaagctctactgaattgtgttgaaaacaaacatggatatgttacatgctaatttgttatattctatttattgattcttg

SEQ ID NO: 34019 - protein, 520 aa, Arabidopsis thaliana
  misc_feature (1)..(520): Ceres Seq. ID no. 13604877
TRPAMTYAWLWTLLAFVLTWMVFHLIKMKKAATGDLEAEAEARRDGATDVIIVGAGVAGASLAYALAKDGRRVHVIERDLKEPQRFMGELMQAGGRFMLAQLGLEDCLEDIDAQEAKSLAIYKDGKHATLPFPDDKSFPHEPVGRLLRNGRLVQRLRQKAASLSNVQLEEGTVKSLIEEEGVVKGVTYKNSAGEEITAFAPLTVVCDGCYSNLRRSLVDNTEEVLSYMVGYVTKNSRLEDPHSLHLIFSKPLVCVIYQITSDEVRCVAEVPADSIPSISNGEMSTFLKKSMAPQIPETGNLREIFLKGIEEGLPEIKSTATKSMSSRLCDKRGVIVLGDAFNMRHPIIASGMMVALSDICILRNLLKPLPNLSNTKKVSDLVKSFYIIRKPMSATVNTLASIFSQVLVATTDEAREGMRQGCFNYLARGDFKTRGLMTILGGMNPHPLTLVLHLVAITLTSMGHLLSPFPSPRRFWHSLRILAWALQMLGAHLVDEGFKEMLIPTNAAAYRRNYIATTTV

SEQ ID NO: 34020 - protein, 516 aa, Arabidopsis thaliana
  misc_feature (1)..(516): Ceres Seq. ID no. 13604878
MTYAWLWTLLAFVLTWMVFHLIKMKKAATGDLEAEAEARRDGATDVIIVGAGVAGASLAYALAKDGRRVHVIERDLKEPQRFMGELMQAGGRFMLAQLGLEDCLEDIDAQEAKSLAIYKDGKHATLPFPDDKSFPHEPVGRLLRNGRLVQRLRQKAASLSNVQLEEGTVKSLIEEEGVVKGVTYKNSAGEEITAFAPLTVVCDGCYSNLRRSLVDNTEEVLSYMVGYVTKNSRLEDPHSLHLIFSKPLVCVIYQITSDEVRCVAEVPADSIPSISNGEMSTFLKKSMAPQIPETGNLREIFLKGIEEGLPEIKSTATKSMSSRLCDKRGVIVLGDAFNMRHPIIASGMMVALSDICILRNLLKPLPNLSNTKKVSDLVKSFYIIRKPMSATVNTLASIFSQVLVATTDEAREGMRQGCFNYLARGDFKTRGLMTILGGMNPHPLTLVLHLVAITLTSMGHLLSPFPSPRRFWHSLRILAWALQMLGAHLVDEGFKEMLIPTNAAAYRRNYIATTTV

SEQ ID NO: 34021 - protein, 500 aa, Arabidopsis thaliana
  misc_feature (1)..(500): Ceres Seq. ID no. 13604879
MVFHLIKMKKAATGDLEAEAEARRDGATDVIIVGAGVAGASLAYALAKDGRRVHVIERDLKEPQRFMGELMQAGGRFMLAQLGLEDCLEDIDAQEAKSLAIYKDGKHATLPFPDDKSFPHEPVGRLLRNGRLVQRLRQKAASLSNVQLEEGTVKSLIEEEGVVKGVTYKNSAGEEITAFAPLTVVCDGCYSNLRRSLVDNTEEVLSYMVGYVTKNSRLEDPHSLHLIFSKPLVCVIYQITSDEVRCVAEVPADSIPSISNGEMSTFLKKSMAPQIPETGNLREIFLKGIEEGLPEIKSTATKSMSSRLCDKRGVIVLGDAFNMRHPIIASGMMVALSDICILRNLLKPLPNLSNTKKVSDLVKSFYIIRKPMSATVNTLASIFSQVLVATTDEAREGMRQGCFNYLARGDFKTRGLMTILGGMNPHPLTLVLHLVAITLTSMGHLLSPFPSPRRFWHSLRILAWALQMLGAHLVDEGFKEMLIPTNAAAYRRNYIATTTV

SEQ ID NO: 34022 - DNA, 3510 bp, Arabidopsis thaliana
  misc_feature (1)..(3510): Ceres Seq. ID no. 13604883
atggcgtccacgcctcctcaaacttctaaaaaggtccgtaacaattccggtagcggccaaaccgtcaaatttgcaagacgaacatctagcggaagatatgtgagtttatctcgagataatatagaattatcaggcgagctctccggggattattctaactatacggtgcacatacctccgacgccggacaatcagcccatggccaccaaagccgaagagcaatacgtgtcaaattctttatttactggtggtttcaacagtgtaacacgtgcacatcttatggacaaagtgatcgattcagatgtcacacaccctcagatggctggcgctaaaggctcttcgtgtgccatgcctgcttgcgacggaaatgtcatgaaagacgagagaggaaaggacgtgatgccatgtgaatgccggtttaagatctgtagggattgcttcatggacgcccagaaagagacaggcctttgtccaggatgcaaggaacaatacaaaatcggggacctagatgacgatacgcctgactattctagtggtgctctccccttaccagctccagggaaagatcaacgtgggaacaacaacaacatgtctatgatgaagaggaaccaaaacggtgaatttgatcacaacagatggctattcgagacgcaaggcacatatgggtacggtaatgcgtattggcctcaagacgaaatgtatggcgatgatatggatgaagggatgagaggcggcatggtggaaacagctgacaagccatggcggccactgagccgacgaatccctattccagccgccatcattagtccttacagattactaatcgtcattcgttttgtcgtgctatgtttttttctaacttggaggatccgaaatcctaacgaagacgcaatatggttatggctcatgtctataatatgcgagctttggtttggattttcatggattctagaccagatccctaagttgtgtccaataaaccggtccactgacctggaagttcttcgtgacaaatttgacatgccttctccctccaacccaacagggaggtcggatctcccaggtattgacctttttgtgtcaacggcagatccagagaaagagccgccccttgtcaccgccaacacgattctgtccatattggccgttgattatccggtggagaaggtgtcatgctatctttctgatgatggaggagctcttctatcctttgaagctatggcagaagctgctagctttgcggatctctgggtacctttttgtcgcaaacataacattgagcctcgaaatccagactcgtatttcagtttgaagatagatccaacaaagaataagagcagaattgattttgtcaaggacagaagaaagattaagagggagtatgatgaattcaaggttcgcatcaacggcctccctgactcaatacggaggaggtcagatgcatttaatgcaagggaggaaatgaaagctctaaaacagatgagggagagcggaggtgatccaacagagcctgtgaaagtccccaaagccacgtggatggcagatggcacccactggccaggaacttgggcagcctctactcgagagcattccaaaggtgatcatgctgggattctccaggtgatgttgaaaccacctagcagcgatccattaattggaaatagcgacgataaagtcattgatttttcagacacggacactcgtttacccatgtttgtgtatgtgtcacgtgagaagcggcctggatatgatcacaacaagaaagctggagccatgaatgcacttgttcgtgcctctgctatcctctcaaatggaccttttatccttaatcttgattgtgatcattacatctataactgtaaggccgtacgagaagggatgtgttttatgatggacagaggtggtgaagacatttgctacattcagtttccgcaaagattcgaaggcatcgatccttctgatagatatgctaacaataacactgtattttttgacggtaatatgcgtgctctcgacggtgtccagggaccagtttatgttggaacaggtactatgtttaggcgctttgctctctatggttttgatccacccaaccctgacaagcttcttgagaagaaggaatcagaaacagaggctctaaccaccagtgactttgacccggaccttgatgtcacacaactccccaagcgctttgggaactccacactcctagctgagtcaattccaattgcagagttccaaggtcgtccattggcagaccacccggctgtcaagtacggtcgtcctcccggagcccttagagtccctcgtgacccacttgatgctaccactgtcgcagagtctgtttctgtaatctcttgttggtatgaggataaaacggagtggggagatagagttggatggatttatgggtcggtgacagaggacgtggtcacaggataccgcatgcataatcgtgggtggcgctcggtttactgcataactaagcgagattcttttcgaggctctgcacccattaatctcacggatcgtcttcaccaggtgttgcggtgggccactgggtctgttgagatcttcttctctagaaacaacgccattctcgcctccaaacgtctcaagttcctccaacgtctcgcatacctcaatgttgggatataccctttcacgtctctgtttctcatcctctattgttttcttccggcattctctcttttctctggacagttcatcgtgcggacgctcagtatctccttcttggtctaccttcttatgatcaccatttgtttgattggattggcggttttggaggtcaagtggtctggcattgggctggaagaatggtggagaaacgaacagtggtggctcatctcaggaacaagctctcacctttacgcagtggtccaaggagtcctcaaagtgattgcagggatcgagatctcctttaccttgacgaccaagtcagggggagatgacaatgaagacatatacgcggatttgtacatagtgaaatggtcgtcgctgatgataccgcctatagtgatagcaatggtgaacataatagcgattgtggtggcgttcatcaggacaatataccaagcggtgccacaatggagcaagctaatcggaggagcatttttcagcttctgggtgttggcgcatttgtatccatttgcaaaaggattgatgggacgaagaggcaaaactccaaccatagtttttgtgtgggcaggtctcattgccatcaccatctctctactgtggacggccataaacccaaacaccggacctgcagctgctgcagagggtgttggaggcggtggttttcaattcccgtaattaaaaaagcattcatataggcgacttgagagttttgtagactaatcacaagaaattaatacgtatactatctttgtttctttttgtttttgtttttgttcctggtagtaaattttcagataactacatgtatatctggattgagatgtcatgactgtataaatcagcctttgt

SEQ ID NO: 34023 - protein, 1111 aa, Arabidopsis thaliana
  misc_feature (1)..(1111): Ceres Seq. ID no. 13604884
MASTPPQTSKKVRNNSGSGQTVKFARRTSSGRYVSLSRDNIELSGELSGDYSNYTVHIPPTPDNQPMATKAEEQYVSNSLFTGGFNSVTRAHLMDKVIDSDVTHPQMAGAKGSSCAMPACDGNVMKDERGKDVMPCECRFKICRDCFMDAQKETGLCPGCKEQYKIGDLDDDTPDYSSGALPLPAPGKDQRGNNNNMSMMKRNQNGEFDHNRWLFETQGTYGYGNAYWPQDEMYGDDMDEGMRGGMVETADKPWRPLSRRIPIPAAIISPYRLLIVIRFVVLCFFLTWRIRNPNEDAIWLWLMSIICELWFGFSWILDQIPKLCPINRSTDLEVLRDKFDMPSPSNPTGRSDLPGIDLFVSTADPEKEPPLVTANTILSILAVDYPVEKVSCYLSDDGGALLSFEAMAEAASFADLWVPFCRKHNIEPRNPDSYFSLKIDPTKNKSRIDFVKDRRKIKREYDEFKVRINGLPDSIRRRSDAFNAREEMKALKQMRESGGDPTEPVKVPKATWMADGTHWPGTWAASTREHSKGDHAGILQVMLKPPSSDPLIGNSDDKVIDFSDTDTRLPMFVYVSREKRPGYDHNKKAGAMNALVRASAILSNGPFILNLDCDHYIYNCKAVREGMCFMMDRGGEDICYIQFPQRFEGIDPSDRYANNNTVFFDGNMRALDGVQGPVYVGTGTMFRRFALYGFDPPNPDKLLEKKESETEALTTSDFDPDLDVTQLPKRFGNSTLLAESIPIAEFQGRPLADHPAVKYGRPPGALRVPRDPLDATTVAESVSVISCWYEDKTEWGDRVGWIYGSVTEDVVTGYRMHNRGWRSVYCITKRDSFRGSAPINLTDRLHQVLRWATGSVEIFFSRNNAILASKRLKFLQRLAYLNVGIYPFTSLFLILYCFLPAFSLFSGQFIVRTLSISFLVYLLMITICLIGLAVLEVKWSGIGLEEWWRNEQWWLISGTSSHLYAVVQGVLKVIAGIEISFTLTTKSGGDDNEDIYADLYIVKWSSLMIPPIVIAMVNIIAIVVAFIRTIYQAVPQWSKLIGGAFFSFWVLAHLYPFAKGLMGRRGKTPTIVFVWAGLIAITISLLWTAINPNTGPAAAAEGVGGGGFQFP

SEQ ID NO: 34024 - protein, 1045 aa, Arabidopsis thaliana
  misc_feature (1)..(1045): Ceres Seq. ID no. 13604885
MATKAEEQYVSNSLFTGGFNSVTRAHLMDKVIDSDVTHPQMAGAKGSSCAMPACDGNVMKDERGKDVMPCECRFKICRDCFMDAQKETGLCPGCKEQYKIGDLDDDTPDYSSGALPLPAPGKDQRGNNNNMSMMKRNQNGEFDHNRWLFETQGTYGYGNAYWPQDEMYGDDMDEGMRGGMVETADKPWRPLSRRIPIPAAIISPYRLLIVIRFVVLCFFLTWRIRNPNEDAIWLWLMSIICELWFGFSWILDQIPKLCPINRSTDLEVLRDKFDMPSPSNPTGRSDLPGIDLFVSTADPEKEPPLVTANTILSILAVDYPVEKVSCYLSDDGGALLSFEAMAEAASFADLWVPFCRKHNIEPRNPDSYFSLKIDPTKNKSRIDFVKDRRKIKREYDEFKVRINGLPDSIRRRSDAFNAREEMKALKQMRESGGDPTEPVKVPKATWMADGTHWPGTWAASTREHSKGDHAGILQVMLKPPSSDPLIGNSDDKVIDFSDTDTRLPMFVYVSREKRPGYDHNKKAGAMNALVRASAILSNGPFILNLDCDHYIYNCKAVREGMCFMMDRGGEDICYIQFPQRFEGIDPSDRYANNNTVFFDGNMRALDGVQGPVYVGTGTMFRRFALYGFDPPNPDKLLEKKESETEALTTSDFDPDLDVTQLPKRFGNSTLLAESIPIAEFQGRPLADHPAVKYGRPPGALRVPRDPLDATTVAESVSVISCWYEDKTEWGDRVGWIYGSVTEDVVTGYRMHNRGWRSVYCITKRDSFRGSAPINLTDRLHQVLRWATGSVEIFFSRNNAILASKRLKFLQRLAYLNVGIYPFTSLFLILYCFLPAFSLFSGQFIVRTLSISFLVYLLMITICLIGLAVLEVKWSGIGLEEWWRNEQWWLISGTSSHLYAVVQGVLKVIAGIEISFTLTTKSGGDDNEDIYADLYIVKWSSLMIPPIVIAMVNIIAIVVAFIRTIYQAVPQWSKLIGGAFFSFWVLAHLYPFAKGLMGRRGKTPTIVFVWAGLIAITISLLWTAINPNTGPAAAAEGVGGGGFQFP

SEQ ID NO: 34025 - protein, 1018 aa, Arabidopsis thaliana
  misc_feature (1)..(1018): Ceres Seq. ID no. 13604886
MDKVIDSDVTHPQMAGAKGSSCAMPACDGNVMKDERGKDVMPCECRFKICRDCFMDAQKETGLCPGCKEQYKIGDLDDDTPDYSSGALPLPAPGKDQRGNNNNMSMMKRNQNGEFDHNRWLFETQGTYGYGNAYWPQDEMYGDDMDEGMRGGMVETADKPWRPLSRRIPIPAAIISPYRLLIVIRFVVLCFFLTWRIRNPNEDAIWLWLMSIICELWFGFSWILDQIPKLCPINRSTDLEVLRDKFDMPSPSNPTGRSDLPGIDLFVSTADPEKEPPLVTANTILSILAVDYPVEKVSCYLSDDGGALLSFEAMAEAASFADLWVPFCRKHNIEPRNPDSYFSLKIDPTKNKSRIDFVKDRRKIKREYDEFKVRINGLPDSIRRRSDAFNAREEMKALKQMRESGGDPTEPVKVPKATWMADGTHWPGTWAASTREHSKGDHAGILQVMLKPPSSDPLIGNSDDKVIDFSDTDTRLPMFVYVSREKRPGYDHNKKAGAMNALVRASAILSNGPFILNLDCDHYIYNCKAVREGMCFMMDRGGEDICYIQFPQRFEGIDPSDRYANNNTVFFDGNMRALDGVQGPVYVGTGTMFRRFALYGFDPPNPDKLLEKKESETEALTTSDFDPDLDVTQLPKRFGNSTLLAESIPIAEFQGRPLADHPAVKYGRPPGALRVPRDPLDATTVAESVSVISCWYEDKTEWGDRVGWIYGSVTEDVVTGYRMHNRGWRSVYCITKRDSFRGSAPINLTDRLHQVLRWATGSVEIFFSRNNAILASKRLKFLQRLAYLNVGIYPFTSLFLILYCFLPAFSLFSGQFIVRTLSISFLVYLLMITICLIGLAVLEVKWSGIGLEEWWRNEQWWLISGTSSHLYAVVQGVLKVIAGIEISFTLTTKSGGDDNEDIYADLYIVKWSSLMIPPIVIAMVNIIAIVVAFIRTIYQAVPQWSKLIGGAFFSFWVLAHLYPFAKGLMGRRGKTPTIVFVWAGLIAITISLLWTAINPNTGPAAAAEGVGGGGFQFP

SEQ ID NO: 34026 - DNA, 1662 bp, Arabidopsis thaliana
  misc_feature (1)..(1662): Ceres Seq. ID no. 13604887
atatcatcaccttccccactaatactctatagtttgtttttgttcttcttataatctttatattttcagcaaacgaaagggaagtgtgtcagaaatctcagagggtgagaatcccaatgaggatcttacccgaacctcgaggttcggttccgtgtcttctccttcttgtgtcggttctcttatcagcgactctctcactcgctcgtgtcgtcgaagttgtcggttacgccgagagcaagatcaaaaccccccatgcattttcaggacttcgagtgacgatcgactgtaaggtgaataaaggccattttgttacaaaaggttcgggaaacattgacgacaaaggaaagtttggtcttaatattcctcatgacattgtctccgacaacggagcgttaaaggaggagtgttacgctcagcttcacagcgcggcgggaacaccttgtccggctcacgacggccttgagtccaccaagatcgtgtttttatccaaatccggggataaacacattttgggtctcaaacaaaatctgaaattttcaccggagatttgcgtttccaaattcttctggcctatgcctaagttgcctccttttaagggctttgatcatcctttccctttacctccacctttggaacttccaccgtttctcaagaagccatgtccacctaaatacagtcctcctgtggaggttccacccccggtaccagtttacgagccgccgccaaagaaagagattcccccgccggttccggtttacgatccaccgcctaagaaagaggttccaccacctgtcccagtttacaagccaccaccaaaggtggagcttccaccgcctattcctaagaagccttgtccacctaaaccgccgaagatagagcacccacctccggttccggtttacaagccaccgccaaagatagagaagccacctccggttccggtttacaagcccccgccaaagatagagcacccacctcccgttccggtacacaagctaccgaagaagccatgtccgcctaagaaagttgatccaccgccggtgccagtccacaaaccaccaacgaagaagccttgtccgcctaagaaagttgatccaccgccggttccagtccacaagccgccgccaaagatagtcattccaccgccgaagatagagcacccacctccagttccggtttacaagccgccgccgaagatagagcatccaccaatctacataccaccaattgtgaagaagccgtgtcctccgccggtaccaatatacaaaccaccggttgtgatccccaagaagccatgccctccgccggtaccagtatacaaaccaccggtagtggtgattccaaagaagccatgtccgccacttccacagctcccaccacttccaaagtttccacctcttcctcctaaatacattcaccaccccaagttcgggaaatggcctccgttgcctccacacccttgagaaacattaaatacgtatatatagatatacgtatactcatgtataatcaacgtgtttgcctttttttaatattttatctttgcatatgttttatatcttgtttcttttgttggctttgagttctctttgtgtagactggttgtttatattcccgcaatcttccaacaataatatggtaatgatacgtttctcttttatc

SEQ ID NO: 34027 - protein, 448 aa, Arabidopsis thaliana; identical to SEQ ID NO: 31898
  misc_feature (1)..(448): Ceres Seq. ID no. 13604888

SEQ ID NO: 34028 - protein, 296 aa, Arabidopsis thaliana; identical to SEQ ID NO: 31899
  misc_feature (1)..(296): Ceres Seq. ID no. 13604889

SEQ ID NO: 34029 - DNA, 3736 bp, Arabidopsis thaliana
  misc_feature (1)..(3736): Ceres Seq. ID no. 13604890
gaattcgcggccgcgtcgatacggctgcgagaagacgacagaaggggattgtcgattcggtttatttcgtctccttcgtcttccactcttactagtgcatgctctgaatctgtatgtaatgggagttcaacagtctggatccattatcctagccgggtcgggtcaaggtctttgagtaagagagacaattcgttttgattcggtgtagaagacatcatgaatactggtggtcggctcattgctggctctcacaacagaaacgaattcgttctcattaacgccgatgagagtgccagaatacgatcagtacaagaactgagtgggcaaacatgtcaaatctgtggagatgaaatcgaattaacggttagcagtgagctctttgttgcttgcaacgaatgcgcattcccggtttgtagaccatgctatgagtatgaacgtagagaaggaaatcaagcttgtcctcagtgcaaaactcgatacaaaaggattaaaggtagtccacgggttgatggagatgatgaagaagaagaagacattgatgatcttgagtatgagtttgatcatgggatggaccctgaacatgccgctgaagccgcactctcttcacgccttaacaccggtcgtggtggattggattcagctccacctggctctcagattcctcttttgacttattgtgatgaagatgctgatatgtattctgatcgtcatgctcttatcgtgcctccttcaacgggatatgggaatcgcgtctatcctgcaccgtttacagattcttctgcacctccacaggcgagatcaatggttcctcagaaagatattgcggaatatggttatggaagtgttgcttggaaggaccgtatggaagtttggaagagacgacaaggcgaaaagcttcaagtcattaagcatgaaggaggaaacaatggtcgaggttccaatgatgacgacgaactagatgatcctgacatgcctatgatggatgaaggaagacaacctctctcaagaaagctacctattcgttcaagcagaataaatccttacaggatgttaattctgtgtcgcctcgcgattcttggtcttttctttcattatagaattctccatccagtcaatgatgcatatggattatggttaacgtcagttatatgcgagatatggtttgcagtgtcttggattcttgatcaattccccaaatggtatcctatagaacgtgaaacatacctcgatagactctctctcaggtacgagaaggaaggaaaaccgtcaggattagcacctgttgatgtttttgttagtacagtggatccgttgaaagagccacccttgattacagcaaacacagttctttccattctagcagttgattatcctgtggataaggttgcgtgttatgtatcagacgatggtgcagctatgcttacatttgaagctctctctgatacagctgagtttgctagaaaatgggttcctttttgtaagaagtttaatatcgagccacgagctcctgagtggtatttttctcagaagatggattacctgaagaacaaagttcatcctgcttttgtcagggaacgtcgtgctatgaagagagattatgaggagtttaaagtgaagataaatgcactggttgctactgcacagaaagtgcctgaggaaggttggactatgcaagatggaactccttggcctggaaacaacgtccgtgaccatcctggaatgattcaggtgttcttgggtcatagtggagttcgtgatacggatggtaatgagttaccacgtctagtgtatgtttctcgtgagaagcggcctggatttgatcaccacaagaaagctggagctatgaattccttgatccgagtctctgctgttctatcaaacgctccttaccttcttaatgtcgattgtgatcactacatcaacaacagcaaagcaattagagaatctatgtgtttcatgatggacccgcaatcgggaaagaaagtttgttatgttcagtttccgcagagatttgatgggattgatagacatgatagatactcaaaccgtaacgttgtgttctttgatattaacatgaaaggtcttgatgggatacaaggaccgatatatgtcgggacaggttgtgtgtttagaagacaggctctttatggttttgatgcaccaaagaagaagaaaccaccaggcaaaacctgtaactgttggcctaaatggtgttgtttgtgttgtgggttgagaaagaagagtaaaacgaaagccaaagataagaaaactaacactaaagagacttcaaagcagattcatgcgctagagaatgtcgacgaaggtgttatcgtcccagtgtcaaatgttgagaagagatctgaagcaacacaattgaaattggagaagaagtttggacaatctccggttttcgttgcctctgctgttctacagaacggtggagttccccgtaacgcaagccccgcatgtttgttaagagaagccattcaagttattagctgcgggtacgaagataaaaccgaatggggaaaagagatcgggtggatttatggatcggtgactgaagatatcctgacgggtttcaagatgcattgccatggatggagatctgtgtactgtatgcctaagcgtgcagcttttaaaggatctgctcctattaacttgtcagatcgtcttcatcaagttctacgttgggctcttggctctgtagagattttcttgagcagacattgtccgatatggtatggttatggtggtggtttaaaatggttggagagattctcttacatcaactctgtcgtctatccttggacttcacttccattgatcgtctattgttctctccccgcggtttgtttactcacaggaaaattcatcgtccctgagataagcaactacgcaggtatactcttcatgctcatgttcatatccatagcagtaactggaatcctcgaaatgcaatggggaggtgtcggaatcgatgattggtggagaaacgagcagttttgggtaatcggaggggcctcctcgcatctatttgctctgtttcaaggtttgctcaaagttctagccggagttaacacgaatttcacagtcacttcaaaagcagcagacgatggagctttctctgagctttacatcttcaagtggacaactttgttgattcctccgacaacacttctgatcattaacatcattggagttattgtcggcgtttctgatgccattagcaatggctatgactcatggggacctctctttgggagacttttcttcgctctttgggtcattgttcatttatacccattcctcaagggaatgcttgggaagcaagacaaaatgcctacgattattgtggtctggtctattcttctagcttcgatcttgacactcttgtgggtcagagttaacccgtttgtggctaaagggggaccagtgttggagatctgtggtctgaattgtggaaactaagatcctcagtgaaagaagagcaaaggagtttgtgttggagctttggaagcaaatgtgttgatgatgatgcaagtgtgtttgtagacgaagatgtgcagtttttactttttacgacttgttaaaccttttttgttacccctaaattaattcttttgttatcatggttatactaatagaattgtttgtttttcttttttacatgtacttttagttattccgtagttattgtataatactgataacgatcatatatacacactttgtt

SEQ ID NO: 34030 - protein, 1084 aa, Arabidopsis thaliana
  misc_feature (1)..(1084): Ceres Seq. ID no. 13604891
MNTGGRLIAGSHNRNEFVLINADESARIRSVQELSGQTCQICGDEIELTVSSELFVACNECAFPVCRPCYEYERREGNQACPQCKTRYKRIKGSPRVDGDDEEEEDIDDLEYEFDHGMDPEHAAEAALSSRLNTGRGGLDSAPPGSQIPLLTYCDEDADMYSDRHALIVPPSTGYGNRVYPAPFTDSSAPPQARSMVPQKDIAEYGYGSVAWKDRMEVWKRRQGEKLQVIKHEGGNNGRGSNDDDELDDPDMPMMDEGRQPLSRKLPIRSSRINPYRMLILCRLAILGLFFHYRILHPVNDAYGLWLTSVICEIWFAVSWILDQFPKWYPIERETYLDRLSLRYEKEGKPSGLAPVDVFVSTVDPLKEPPLITANTVLSILAVDYPVDKVACYVSDDGAAMLTFEALSDTAEFARKWVPFCKKFNIEPRAPEWYFSQKMDYLKNKVHPAFVRERRAMKRDYEEFKVKINALVATAQKVPEEGWTMQDGTPWPGNNVRDHPGMIQVFLGHSGVRDTDGNELPRLVYVSREKRPGFDHHKKAGAMNSLIRVSAVLSNAPYLLNVDCDHYINNSKAIRESMCFMMDPQSGKKVCYVQFPQRFDGIDRHDRYSNRNVVFFDINMKGLDGIQGPIYVGTGCVFRRQALYGFDAPKKKKPPGKTCNCWPKWCCLCCGLRKKSKTKAKDKKTNTKETSKQIHALENVDEGVIVPVSNVEKRSEATQLKLEKKFGQSPVFVASAVLQNGGVPRNASPACLLREAIQVISCGYEDKTEWGKEIGWIYGSVTEDILTGFKMHCHGWRSVYCMPKRAAFKGSAPINLSDRLHQVLRWALGSVEIFLSRHCPIWYGYGGGLKWLERFSYINSVVYPWTSLPLIVYCSLPAVCLLTGKFIVPEISNYAGILFMLMFISIAVTGILEMQWGGVGIDDWWRNEQFWVIGGASSHLFALFQGLLKVLAGVNTNFTVTSKAADDGAFSELYIFKWTTLLIPPTTLLIINIIGVIVGVSDAISNGYDSWGPLFGRLFFALWVIVHLYPFLKGMLGKQDKMPTIIVVWSILLASILTLLWVRVNPFVAKGGPVLEICGLNCGN

SEQ ID NO: 34031 - protein, 967 aa, Arabidopsis thaliana
  misc_feature (1)..(967): Ceres Seq. ID no. 13604892
MDPEHAAEAALSSRLNTGRGGLDSAPPGSQIPLLTYCDEDADMYSDRHALIVPPSTGYGNRVYPAPFTDSSAPPQARSMVPQKDIAEYGYGSVAWKDRMEVWKRRQGEKLQVIKHEGGNNGRGSNDDDELDDPDMPMMDEGRQPLSRKLPIRSSRINPYRMLILCRLAILGLFFHYRILHPVNDAYGLWLTSVICEIWFAVSWILDQFPKWYPIERETYLDRLSLRYEKEGKPSGLAPVDVFVSTVDPLKEPPLITANTVLSILAVDYPVDKVACYVSDDGAAMLTFEALSDTAEFARKWVPFCKKFNIEPRAPEWYFSQKMDYLKNKVHPAFVRERRAMKRDYEEFKVKINALVATAQKVPEEGWTMQDGTPWPGNNVRDHPGMIQVFLGHSGVRDTDGNELPRLVYVSREKRPGFDHHKKAGAMNSLIRVSAVLSNAPYLLNVDCDHYINNSKAIRESMCFMMDPQSGKKVCYVQFPQRFDGIDRHDRYSNRNVVFFDINMKGLDGIQGPIYVGTGCVFRRQALYGFDAPKKKKPPGKTCNCWPKWCCLCCGLRKKSKTKAKDKKTNTKETSKQIHALENVDEGVIVPVSNVEKRSEATQLKLEKKFGQSPVFVASAVLQNGGVPRNASPACLLREAIQVISCGYEDKTEWGKEIGWIYGSVTEDILTGFKMHCHGWRSVYCMPKRAAFKGSAPINLSDRLHQVLRWALGSVEIFLSRHCPIWYGYGGGLKWLERFSYINSVVYPWTSLPLIVYCSLPAVCLLTGKFIVPEISNYAGILFMLMFISIAVTGILEMQWGGVGIDDWWRNEQFWVIGGASSHLFALFQGLLKVLAGVNTNFTVTSKAADDGAFSELYIFKWTTLLIPPTTLLIINIIGVIVGVSDAISNGYDSWGPLFGRLFFALWVIVHLYPFLKGMLGKQDKMPTIIVVWSILLASILTLLWVRVNPFVAKGGPVLEICGLNCGN

SEQ ID NO: 34032 - protein, 925 aa, Arabidopsis thaliana
  misc_feature (1)..(925): Ceres Seq. ID no. 13604893
MYSDRHALIVPPSTGYGNRVYPAPFTDSSAPPQARSMVPQKDIAEYGYGSVAWKDRMEVWKRRQGEKLQVIKHEGGNNGRGSNDDDELDDPDMPMMDEGRQPLSRKLPIRSSRINPYRMLILCRLAILGLFFHYRILHPVNDAYGLWLTSVICEIWFAVSWILDQFPKWYPIERETYLDRLSLRYEKEGKPSGLAPVDVFVSTVDPLKEPPLITANTVLSILAVDYPVDKVACYVSDDGAAMLTFEALSDTAEFARKWVPFCKKFNIEPRAPEWYFSQKMDYLKNKVHPAFVRERRAMKRDYEEFKVKINALVATAQKVPEEGWTMQDGTPWPGNNVRDHPGMIQVFLGHSGVRDTDGNELPRLVYVSREKRPGFDHHKKAGAMNSLIRVSAVLSNAPYLLNVDCDHYINNSKAIRESMCFMMDPQSGKKVCYVQFPQRFDGIDRHDRYSNRNVVFFDINMKGLDGIQGPIYVGTGCVFRRQALYGFDAPKKKKPPGKTCNCWPKWCCLCCGLRKKSKTKAKDKKTNTKETSKQIHALENVDEGVIVPVSNVEKRSEATQLKLEKKFGQSPVFVASAVLQNGGVPRNASPACLLREAIQVISCGYEDKTEWGKEIGWIYGSVTEDILTGFKMHCHGWRSVYCMPKRAAFKGSAPINLSDRLHQVLRWALGSVEIFLSRHCPIWYGYGGGLKWLERFSYINSVVYPWTSLPLIVYCSLPAVCLLTGKFIVPEISNYAGILFMLMFISIAVTGILEMQWGGVGIDDWWRNEQFWVIGGASSHLFALFQGLLKVLAGVNTNFTVTSKAADDGAFSELYIFKWTTLLIPPTTLLIINIIGVIVGVSDAISNGYDSWGPLFGRLFFALWVIVHLYPFLKGMLGKQDKMPTIIVVWSILLASILTLLWVRVNPFVAKGGPVLEICGLNCGN

SEQ ID NO: 34033 - DNA, 1953 bp, Arabidopsis thaliana
  misc_feature (1)..(1953): Ceres Seq. ID no. 13604902
atggaagatgacaaggatatatacacaaaagatggaactcttgacattcacaagaaaccagccaacaagaataaaactggaacctggaaagcttgcagattcattcttggaactgagtgctgtgaaagattagcttactatggaatgagtactaatctcatcaactatctcgagaaacaaatgaatatggaaaacgtctctgcttctaagagtgtcagtaactggtctggaacatgttacgctactcctttgatcggtgcttttatcgccgatgcttatctcggtcgatactggaccatcgcttcctttgtcgtcatctacattgccggaatgacgctattgacgatatcagcttcggttcctggtctaacaccaacctgcagcggagaaacctgtcacgcaacagcgggtcaaaccgctattacattcatagcgctttacttgatcgcactcggaactggagggatcaagccttgtgtctcttcctttggtgctgatcagtttgatgatacagacgaaaaagagaaagagtctaagagctctttctttaactggttctactttgtgatcaacgttggtgcaatgattgcttcctctgttctcgtttggattcagatgaatgttggttggggttggggtttaggtgttcccaccgtcgcaatggctatagccgtcgtgttcttcttcgccggaagcaacttctacaggctgcagaaaccaggaggaagtcctctcacaagaatgctgcaagtcattgtggcttcatgcagaaaatctaaagtgaaaattcctgaagatgaatctcttctctacgagaaccaagacgccgaaagcagtatcataggaagccgcaagctcgaacacaccaaaatattaacgttctttgataaggcagcagtggaaacagagagtgacaacaaaggagcagctaagtcgtcttcatggaagctatgcacagtgacacaagtagaagagctcaaagcactgatccgtctcttaccgatttgggccacagggattgttttcgcttcggtttatagccaaatggggactgtgtttgtactacaaggcaacacactggaccaacacatgggacctaacttcaaaatcccttccgcatcactctccttattcgatacgcttagtgtcctgttttgggcacctgtctacgacaagctaattgttcccttcgcccggaaatacacaggtcacgaacgcggattcacacagcttcaacggattggaatcgggcttgtaatctccatcttttctatggtctctgcgggaatcctcgaggtcgcaaggttaaactacgttcaaacacacaatctttacaatgaagagactatcccgatgacgattttctggcaagttccgcagtattttttggtgggttgcgccgaggttttcacgtttataggtcagcttgagttcttctatgaccaagctcctgatgctatgaggagtctctgctcggctttgtcgctcaccgcaattgcatttgggaactatctgagcacatttctggtgacattggtcactaaagtcacgagatcaggtggaagaccaggctggatcgctaagaacctcaacaatggtcatcttgattacttcttttggctattagctggtctgagtttcttgaatttcttggtctacctttggattgctaaatggtacacttacaagaaaacgaccgggcatgcgctttgatgatacaaaaaacataacgatggctgcaatcacgaattctgatttgaaattagtcgcaatgtttgataatctcgttactgaaacatatttacagatattatttttatttttcataaacaagcaagtttgaagttctttgcttgagtttaggttacaagatactacttttgaattcgactatccttattgctttgtggttgcagagttcaagggtttgtatttaacacaagcgttgtgctg

SEQ ID NO: 34034 - protein, 570 aa, Arabidopsis thaliana
  misc_feature (1)..(570): Ceres Seq. ID no. 13604903
MEDDKDIYTKDGTLDIHKKPANKNKTGTWKACRFILGTECCERLAYYGMSTNLINYLEKQMNMENVSASKSVSNWSGTCYATPLIGAFIADAYLGRYWTIASFVVIYIAGMTLLTISASVPGLTPTCSGETCHATAGQTAITFIALYLIALGTGGIKPCVSSFGADQFDDTDEKEKESKSSFFNWFYFVINVGAMIASSVLVWIQMNVGWGWGLGVPTVAMAIAVVFFFAGSNFYRLQKPGGSPLTRMLQVIVASCRKSKVKIPEDESLLYENQDAESSIIGSRKLEHTKILTFFDKAAVETESDNKGAAKSSSWKLCTVTQVEELKALIRLLPIWATGIVFASVYSQMGTVFVLQGNTLDQHMGPNFKIPSASLSLFDTLSVLFWAPVYDKLIVPFARKYTGHERGFTQLQRIGIGLVISIFSMVSAGILEVARLNYVQTHNLYNEETIPMTIFWQVPQYFLVGCAEVFTFIGQLEFFYDQAPDAMRSLCSALSLTAIAFGNYLSTFLVTLVTKVTRSGGRPGWIAKNLNNGHLDYFFWLLAGLSFLNFLVYLWIAKWYTYKKTTGHAL

SEQ ID NO: 34035 - protein, 522 aa, Arabidopsis thaliana
  misc_feature (1)..(522): Ceres Seq. ID no. 13604904
MSTNLINYLEKQMNMENVSASKSVSNWSGTCYATPLIGAFIADAYLGRYWTIASFVVIYIAGMTLLTISASVPGLTPTCSGETCHATAGQTAITFIALYLIALGTGGIKPCVSSFGADQFDDTDEKEKESKSSFFNWFYFVINVGAMIASSVLVWIQMNVGWGWGLGVPTVAMAIAVVFFFAGSNFYRLQKPGGSPLTRMLQVIVASCRKSKVKIPEDESLLYENQDAESSIIGSRKLEHTKILTFFDKAAVETESDNKGAAKSSSWKLCTVTQVEELKALIRLLPIWATGIVFASVYSQMGTVFVLQGNTLDQHMGPNFKIPSASLSLFDTLSVLFWAPVYDKLIVPFARKYTGHERGFTQLQRIGIGLVISIFSMVSAGILEVARLNYVQTHNLYNEETIPMTIFWQVPQYFLVGCAEVFTFIGQLEFFYDQAPDAMRSLCSALSLTAIAFGNYLSTFLVTLVTKVTRSGGRPGWIAKNLNNGHLDYFFWLLAGLSFLNFLVYLWIAKWYTYKKTTGHAL

SEQ ID NO: 34036 - protein, 510 aa, Arabidopsis thaliana
  misc_feature (1)..(510): Ceres Seq. ID no. 13604905
MNMENVSASKSVSNWSGTCYATPLIGAFIADAYLGRYWTIASFVVIYIAGMTLLTISASVPGLTPTCSGETCHATAGQTAITFIALYLIALGTGGIKPCVSSFGADQFDDTDEKEKESKSSFFNWFYFVINVGAMIASSVLVWIQMNVGWGWGLGVPTVAMAIAVVFFFAGSNFYRLQKPGGSPLTRMLQVIVASCRKSKVKIPEDESLLYENQDAESSIIGSRKLEHTKILTFFDKAAVETESDNKGAAKSSSWKLCTVTQVEELKALIRLLPIWATGIVFASVYSQMGTVFVLQGNTLDQHMGPNFKIPSASLSLFDTLSVLFWAPVYDKLIVPFARKYTGHERGFTQLQRIGIGLVISIFSMVSAGILEVARLNYVQTHNLYNEETIPMTIFWQVPQYFLVGCAEVFTFIGQLEFFYDQAPDAMRSLCSALSLTAIAFGNYLSTFLVTLVTKVTRSGGRPGWIAKNLNNGHLDYFFWLLAGLSFLNFLVYLWIAKWYTYKKTTGHAL

SEQ ID NO: 34037 - DNA, 1575 bp, Arabidopsis thaliana
  misc_feature (1)..(1575): Ceres Seq. ID no. 13604906
acttgtcagagacagaagattaaagaagaagaggcgtttctctctctttttttgcttcagaaaaaatggggtttttcttgtgttcctcttcttcaatcttcttcaagttcggaatctctataatctttctagtttctttctctggtttaactccttcagaagcttatgatcctttggacccgagtgggaacattactgtcaaatgggatatcataacctggactggagatggctatgtggcgactgtaacggtatataattttcagcaatatcgacacattcaagctccaggttggactcttggatggtcatgggcaaagagagaggttatatggggaatgaatggaggacaaaccacagaacaaggagattgttctaaattcaaaggaaccattcctcattgctgtaaaaagacaccttctgttgttgatctcttacctggatctccttacaatcagcagattgctaattgttgcagagggggtgtgcttaactcgtgggctcaagatcccgcaactgctgtttccgctttccagcttactgttggacaagctggaaccacaaataagacagttagggtacctaagaatttcactctcaaagctcctggaccgggatatacttgtagccccgcgaagattgtaaaaccgactagattcatcggtactgataaacgaagagttactcaagcattaatgacttggaatgtaacttgcacatactcgcagttcttagctcagaaaacaccaacttgctgtgtatctctttcatcgttttataacaagacaatagtttcttgtccaacatgctcttgtggatgcagaaacacttctcagccagggaattgtgtagacccaaaaggtccacggatagcatcagtcattccaaatccggggaagaacgcatatataccgcctctggtccaatgtacaaagcatatgtgtccagttagaatccactggcatgtgaaagtcaactacaaacagtactggagagttaaagtcaccatcacaaatttcaactacaacatgaactattcacagtggaatctcgtcgtgcagcatccgaatttcgacaatctaactcagacttttagcttcaactataaacctctgactccttatgcttccataaatgatactgggattctctggggaataaagttctacaatgatctgttgatgcaagctgggccatttggtaatgtacaatctgagctacttttccagaaagaagcatcagctttcacatttgagaaaggttgggcgtttccaagaagaatctatttcaatggagataactgtgtgatgcctcctcctgattcttacccttggctgcccaataccggctcgcacaaatcagtcggttccctgtttgcagcaatggccttgttactgattgtgttcctacatggaaacttgtaagaatcatcaagtgtagaattcttctgctgcagtttttcgaactgatataacccatcaagagagagttggtagcttagttttttgtgttctctcttgtctgtcctcttcctgtacaacgctttaatattagatggttaactagatccccttg

SEQ ID NO: 34038 - protein, 452 aa, Arabidopsis thaliana
  misc_feature (1)..(452): Ceres Seq. ID no. 13604907
MGFFLCSSSSIFFKFGISIIFLVSFSGLTPSEAYDPLDPSGNITVKWDIITWTGDGYVATVTVYNFQQYRHIQAPGWTLGWSWAKREVIWGMNGGQTTEQGDCSKFKGTIPHCCKKTPSVVDLLPGSPYNQQIANCCRGGVLNSWAQDPATAVSAFQLTVGQAGTTNKTVRVPKNFTLKAPGPGYTCSPAKIVKPTRFIGTDKRRVTQALMTWNVTCTYSQFLAQKTPTCCVSLSSFYNKTIVSCPTCSCGCRNTSQPGNCVDPKGPRIASVIPNPGKNAYIPPLVQCTKHMCPVRIHWHVKVNYKQYWRVKVTITNFNYNMNYSQWNLVVQHPNFDNLTQTFSFNYKPLTPYASINDTGILWGIKFYNDLLMQAGPFGNVQSELLFQKEASAFTFEKGWAFPRRIYFNGDNCVMPPPDSYPWLPNTGSHKSVGSLFAAMALLLIVFLHGNL

SEQ ID NO: 34039 - protein, 361 aa, Arabidopsis thaliana
  misc_feature (1)..(361): Ceres Seq. ID no. 13604908
MNGGQTTEQGDCSKFKGTIPHCCKKTPSVVDLLPGSPYNQQIANCCRGGVLNSWAQDPATAVSAFQLTVGQAGTTNKTVRVPKNFTLKAPGPGYTCSPAKIVKPTRFIGTDKRRVTQALMTWNVTCTYSQFLAQKTPTCCVSLSSFYNKTIVSCPTCSCGCRNTSQPGNCVDPKGPRIASVIPNPGKNAYIPPLVQCTKHMCPVRIHWHVKVNYKQYWRVKVTITNFNYNMNYSQWNLVVQHPNFDNLTQTFSFNYKPLTPYASINDTGILWGIKFYNDLLMQAGPFGNVQSELLFQKEASAFTFEKGWAFPRRIYFNGDNCVMPPPDSYPWLPNTGSHKSVGSLFAAMALLLIVFLHGNL

SEQ ID NO: 34040 - protein, 242 aa, Arabidopsis thaliana
  misc_feature (1)..(242): Ceres Seq. ID no. 13604909
MTWNVTCTYSQFLAQKTPTCCVSLSSFYNKTIVSCPTCSCGCRNTSQPGNCVDPKGPRIASVIPNPGKNAYIPPLVQCTKHMCPVRIHWHVKVNYKQYWRVKVTITNFNYNMNYSQWNLVVQHPNFDNLTQTFSFNYKPLTPYASINDTGILWGIKFYNDLLMQAGPFGNVQSELLFQKEASAFTFEKGWAFPRRIYFNGDNCVMPPPDSYPWLPNTGSHKSVGSLFAAMALLLIVFLHGNL

SEQ ID NO: 34041 - DNA, 1360 bp, Arabidopsis thaliana
  misc_feature (1)..(1360): Ceres Seq. ID no. 13604910
ataacttttatagattcacaaaaacttttcttcagattcacaatctcatcacaacccttcaaaaagagaaaagatctaaagaataaacaagagccctaatatcaaatcacaaccaaaaaaaccaaagaaagctaattaaagttttctctctagctattcctcttcttttcttgttcttgaaaactagggtttacttcaccaaaagataagatctttccccagaaaaagcaatacccaagtcatgtttctgtgtgtctgtatatagataaaacattacataccctaataaggttacacaaatagctataaaagagggaaaataagatagggattttttggggtgaggaaagatgggaagaggaagagtagagctcaagaggatagagaacaaaatcaacagacaagtgacgtttgctaaacgtagaaatggtttgctgaaaaaagcttatgagctttctgttctctgcgatgctgaagtctctctcatcgtcttctccaaccgtggcaagctctacgagttctgcagcacctccaacatgctcaagacactggaaaggtatcagaagtgtagctatggctccattgaagtcaacaacaaacctgctaaagagcttgagaacagctacagagagtacttgaagctgaaaggtagatatgaaaatctgcaacgtcagcagagaaatcttcttggagaggatcttggacctctgaattcaaaggagctagagcagcttgagcgtcaactagacggctctctgaagcaagttcgctgcatcaagacacagtatatgcttgaccagctctctgatcttcaaggtaaggagcatatcttgcttgatgccaacagagctttgtcaatgaagctggaagatatgatcggcgtgagacatcaccatataggaggaggatgggaaggtggtgatcaacagaatattgcctatggacatcctcaggctcattctcagggactataccaatctcttgaatgtgatcccactttgcaaattggatatagccatccagtgtgctcagagcaaatggctgtgacggtgcaaggtcagtcccaacaaggaaacggctacatccctggctggatgctgtgagcgatacttcttcccccaataaagatcttaagcaagtactggtggggtcttcgtggtgtgatcttagatcttatgcatatgaataataatgttattgcacaagacttttgcttttgtagacacaagtggctatagctgtaatagccttcaacatctctcttctgtttcaggatttgtttgtgcctattgtaattgcttatatatgtatggtttgtataatgtgtgaaatgttaacatcgaccatgtctcatctggtg

SEQ ID NO: 34042 - protein, 250 aa, Arabidopsis thaliana
  misc_feature (1)..(250): Ceres Seq. ID no. 13604911
MGRGRVELKRIENKINRQVTFAKRRNGLLKKAYELSVLCDAEVSLIVFSNRGKLYEFCSTSNMLKTLERYQKCSYGSIEVNNKPAKELENSYREYLKLKGRYENLQRQQRNLLGEDLGPLNSKELEQLERQLDGSLKQVRCIKTQYMLDQLSDLQGKEHILLDANRALSMKLEDMIGVRHHHIGGGWEGGDQQNIAYGHPQAHSQGLYQSLECDPTLQIGYSHPVCSEQMAVTVQGQSQQGNGYIPGWML

SEQ ID NO: 34043 - protein, 188 aa, Arabidopsis thaliana
  misc_feature (1)..(188): Ceres Seq. ID no. 13604912
MLKTLERYQKCSYGSIEVNNKPAKELENSYREYLKLKGRYENLQRQQRNLLGEDLGPLNSKELEQLERQLDGSLKQVRCIKTQYMLDQLSDLQGKEHILLDANRALSMKLEDMIGVRHHHIGGGWEGGDQQNIAYGHPQAHSQGLYQSLECDPTLQIGYSHPVCSEQMAVTVQGQSQQGNGYIPGWML

SEQ ID NO: 34044 - DNA, 2146 bp, Arabidopsis thaliana
  misc_feature (1)..(2146): Ceres Seq. ID no. 13604913
gtcaacttcatcttcttcttctctttctcctttcattttttttcttgtgtttcttcttttacgtgggtccttcaatctccatgaaggacccgaccattgcttaatcctaaacaaaactccaaaaatctaattcttttcgatctgttttatcttcaaataataatactctttgattgctaaaaccgattttgatcatcatcatgcactgttttccgtgtttctcttcgccaaagaacaagaaatcttcaactacgaatgagaccaacgacaacaacgaacccaaaccagatgataggagacgtgcagaagaaacagaggaaatagagcaatcggaaggaacatcgttgaagatattcactttccgggaattagctacagccacaaagaatttccggcaagagtgtttgctaggagaaggtggatttggtagggtttacaaaggaaccctcaaatctactggccaggtggtggctgtaaagcaactagacaagcatggattacatggaaacaaagagtttcaagctgaggttttgtctttaggccaacttgatcatccgaatcttgttaagcttattggttactgcgcggatggagatcaaaggcttttggtctatgattatatctctggaggttcacttcaagaccatcttcatgaaccaaaagcagacagtgatccgatggattggacaactaggatgcagatagcgtatgctgcagcgcaagggcttgattacttgcacgataaagcgaatccacccgtgatatacagagatttgaaagcttcaaacattttgttagatgatgacttttctcctaagctttctgattttggtctacataagctaggacccgggacaggtgataagatgatggctttatcttcacgagtaatgggaacttatggttactctgcacctgagtatacacgaggcggaaatctcactttgaaatcagatgtctatagctttggtgttgtgttgcttgagcttatcacgggtcgaagagctcttgatactactaggcctaatgatgaacagaacttagtttcttgggcacaaccgatatttagagatccgaagaggtatcccgatatggcagatccagttttggagaataaattctcagagagaggattaaaccaagcagtggcaatagcttcaatgtgtgtgcaagaggaagcatcagctcgtcctcttataagcgatgtaatggttgcgcttagcttcctttcgatgcctacagaagatggtattcccacaacagttcctatcttatccttcaaagacaagagcatgtctatagccttaagccgacatgattcaaatcttgtatctcctcctcctgagctagctacggaagatgacaaatctagtacctcatcaggcgaagaatcatctttggagagcgaaaaggagagtgtgagtaagaatgagtataagaagaaacatgaagaggaagatagctcaatggaatctgatgatgagtctgattctaactctgaacatgaaaaggaccaaccaccaaagcctattgatgagaagaaccaggcgcaaagcttgaagataaagtatagatatagctgggaagatattgatgtcaatgatgagaggctaagcagtaaaagcagccaaaaatcaaacgacgaaagtacttcttcgcgttatgatagcgacagagatcaagacgagaaagggaaagaagaagaggaagaggaagaggcagaagaaaagcatactcatattgaacacattgatagctcaaaaactgatgatgatcaaagtgtttactttgataatgatgatgattcaggagatgacaatggaggctctttgcatcggataaaatcagatgttgcgatcgattctattaaagagtgacatttttcaagattttttatcaatccgttgaagctcacaagaagtatttgaaacttttttgggtttatttttgggaaaaattcttaattgggtattaaaataagatacatattgacggtttttcttaacaaattataaccatctctctttatacatgatgaagatgttttggattgatagattaataaagaaacaagttgtataatcagataatctgattgagaaaacttatctcagcttttgtaatcctttaaaaaaaaatgttacgt

SEQ ID NO: 34045 - protein, 558 aa, Arabidopsis thaliana
  misc_feature (1)..(558): Ceres Seq. ID no. 13604914
MHCFPCFSSPKNKKSSTTNETNDNNEPKPDDRRRAEETEEIEQSEGTSLKIFTFRELATATKNFRQECLLGEGGFGRVYKGTLKSTGQVVAVKQLDKHGLHGNKEFQAEVLSLGQLDHPNLVKLIGYCADGDQRLLVYDYISGGSLQDHLHEPKADSDPMDWTTRMQIAYAAAQGLDYLHDKANPPVIYRDLKASNILLDDDFSPKLSDFGLHKLGPGTGDKMMALSSRVMGTYGYSAPEYTRGGNLTLKSDVYSFGVVLLELITGRRALDTTRPNDEQNLVSWAQPIFRDPKRYPDMADPVLENKFSERGLNQAVAIASMCVQEEASARPLISDVMVALSFLSMPTEDGIPTTVPILSFKDKSMSIALSRHDSNLVSPPPELATEDDKSSTSSGEESSLESEKESVSKNEYKKKHEEEDSSMESDDESDSNSEHEKDQPPKPIDEKNQAQSLKIKYRYSWEDIDVNDERLSSKSSQKSNDESTSSRYDSDRDQDEKGKEEEEEEEAEEKHTHIEHIDSSKTDDDQSVYFDNDDDSGDDNGGSLHRIKSDVAIDSIKE

SEQ ID NO: 34046 - protein, 399 aa, Arabidopsis thaliana
  misc_feature (1)..(399): Ceres Seq. ID no. 13604915
MDWTTRMQIAYAAAQGLDYLHDKANPPVIYRDLKASNILLDDDFSPKLSDFGLHKLGPGTGDKMMALSSRVMGTYGYSAPEYTRGGNLTLKSDVYSFGVVLLELITGRRALDTTRPNDEQNLVSWAQPIFRDPKRYPDMADPVLENKFSERGLNQAVAIASMCVQEEASARPLISDVMVALSFLSMPTEDGIPTTVPILSFKDKSMSIALSRHDSNLVSPPPELATEDDKSSTSSGEESSLESEKESVSKNEYKKKHEEEDSSMESDDESDSNSEHEKDQPPKPIDEKNQAQSLKIKYRYSWEDIDVNDERLSSKSSQKSNDESTSSRYDSDRDQDEKGKEEEEEEEAEEKHTHIEHIDSSKTDDDQSVYFDNDDDSGDDNGGSLHRIKSDVAIDSIKE

SEQ ID NO: 34047 - protein, 393 aa, Arabidopsis thaliana
  misc_feature (1)..(393): Ceres Seq. ID no. 13604916
MQIAYAAAQGLDYLHDKANPPVIYRDLKASNILLDDDFSPKLSDFGLHKLGPGTGDKMMALSSRVMGTYGYSAPEYTRGGNLTLKSDVYSFGVVLLELITGRRALDTTRPNDEQNLVSWAQPIFRDPKRYPDMADPVLENKFSERGLNQAVAIASMCVQEEASARPLISDVMVALSFLSMPTEDGIPTTVPILSFKDKSMSIALSRHDSNLVSPPPELATEDDKSSTSSGEESSLESEKESVSKNEYKKKHEEEDSSMESDDESDSNSEHEKDQPPKPIDEKNQAQSLKIKYRYSWEDIDVNDERLSSKSSQKSNDESTSSRYDSDRDQDEKGKEEEEEEEAEEKHTHIEHIDSSKTDDDQSVYFDNDDDSGDDNGGSLHRIKSDVAIDSIKE

SEQ ID NO: 34048 - DNA, 1936 bp, Arabidopsis thaliana
  misc_feature (1)..(1936): Ceres Seq. ID no. 13604921
atcagtctcttaactcaccatcacaagaacaagaaagatgaagagaggatacggagaaacatgggatccgccaccaaaaccactaccagcttctcgttccggagaaggtccttcaatggcggataagaagaaggctgatgatgacaacaacaacagcaacatggatgatgagcttcttgctgttcttggctacaaggttcgatcttctgagatggctgaagtagcacagaagcttgaacaacttgagatggtcttgtctaatgatgatgttggttctactgtcttaaacgactctgttcattataacccatctgatctctctaactgggtcgagagcatgctttctgagctgaacaacccggcttcttcggatcttgacacgacccgaagttgtgtggatagatccgaatacgatctcagagcaattccgggtctttctgcgtttccaaaggaagaggaagtctttgacgaggaagctagcagcaagaggatccgactcggatcgtggtgcgaatcgtcggacgagtcaactcggtccgtggtgctcgttgactctcaggagaccggagttagacttgtccacgcactagtggcgtgcgctgaggcgattcaccaggagaatctcaacttagctgacgcgctggtgaaacgcgtgggaacactcgcgggttctcaagctggagctatgggaaaagtcgctacgtattttgctcaagccttggctcgtcgtatttaccgtgattacacggcggagacggacgtttgcgcggcggtgaacccatctttcgaagaggttttggagatgcacttttacgagtcttgcccttacctgaagttcgctcatttcacggcgaaccaagcgattctagaagctgttacgacggcgcgtagagttcacgtcattgatttagggcttaatcaagggatgcaatggcctgctttaatgcaagctttagctctccgacccggtggacctccgtcgtttcgtctcaccggaatcggaccaccgcagacggagaattcagattcgcttcaacagttaggttggaaattagctcaattcgctcagaacatgggcgttgaattcgaattcaaaggcttagccgctgagagtttatcggatcttgaacccgaaatgttcgaaacccgacccgaatctgaaaccttagtggttaattcggtatttgagctccaccggttattagcccgatccggttcaatcgaaaagcttctcaatacggttaaagctattaaaccgagtatcgtaacggtggttgagcaagaagcgaaccacaacggaatcgtcttcctcgataggttcaacgaagcgcttcattactactcgagcttgtttgactcgctcgaagacagttatagtttaccgagtcaagaccgagttatgtcagaagtgtacttagggagacagatactcaacgttgttgcggcggaagggtccgatcgggtcgagcggcacgagacggctgcacagtggaggattcggatgaaatccgctgggtttgacccgattcatctcggatctagcgcgtttaaacaagcgagtatgcttttatcgctttacgctaccggagatggatacagagttgaagaaaatgacggatgtttaatgatagggtggcagacgcgaccactcatcacaacctcggcgtggaaactcgcctgagtcgcggcggtagagatgactcgcctgaaaccgggaaaaacaataaatgttttaaaaaattaggaaaagagaccgtaactttagttatgtttttactttttaacccgaagtttttgtgtgtttaacctttttgcctaaatgtttacaactttatctttttggaccttgtgcgtatctttgagagttaagagaacgagtaaaaaatcttgtatcgtagatcgagctaagtagttttcaataaatggaaggataacc

SEQ ID NO: 34049 - protein, 547 aa, Arabidopsis thaliana
  misc_feature (1)..(547): Ceres Seq. ID no. 13604922
MKRGYGETWDPPPKPLPASRSGEGPSMADKKKADDDNNNSNMDDELLAVLGYKVRSSEMAEVAQKLEQLEMVLSNDDVGSTVLNDSVHYNPSDLSNWVESMLSELNNPASSDLDTTRSCVDRSEYDLRAIPGLSAFPKEEEVFDEEASSKRIRLGSWCESSDESTRSVVLVDSQETGVRLVHALVACAEAIHQENLNLADALVKRVGTLAGSQAGAMGKVATYFAQALARRIYRDYTAETDVCAAVNPSFEEVLEMHFYESCPYLKFAHFTANQAILEAVTTARRVHVIDLGLNQGMQWPALMQALALRPGGPPSFRLTGIGPPQTENSDSLQQLGWKLAQFAQNMGVEFEFKGLAAESLSDLEPEMFETRPESETLVVNSVFELHRLLARSGSIEKLLNTVKAIKPSIVTVVEQEANHNGIVFLDRFNEALHYYSSLFDSLEDSYSLPSQDRVMSEVYLGRQILNVVAAEGSDRVERHETAAQWRIRMKSAGFDPIHLGSSAFKQASMLLSLYATGDGYRVEENDGCLMIGWQTRPLITTSAWKLA

SEQ ID NO: 34050 - protein, 521 aa, Arabidopsis thaliana
  misc_feature (1)..(521): Ceres Seq. ID no. 13604923
MADKKKADDDNNNSNMDDELLAVLGYKVRSSEMAEVAQKLEQLEMVLSNDDVGSTVLNDSVHYNPSDLSNWVESMLSELNNPASSDLDTTRSCVDRSEYDLRAIPGLSAFPKEEEVFDEEASSKRIRLGSWCESSDESTRSVVLVDSQETGVRLVHALVACAEAIHQENLNLADALVKRVGTLAGSQAGAMGKVATYFAQALARRIYRDYTAETDVCAAVNPSFEEVLEMHFYESCPYLKFAHFTANQAILEAVTTARRVHVIDLGLNQGMQWPALMQALALRPGGPPSFRLTGIGPPQTENSDSLQQLGWKLAQFAQNMGVEFEFKGLAAESLSDLEPEMFETRPESETLVVNSVFELHRLLARSGSIEKLLNTVKAIKPSIVTVVEQEANHNGIVFLDRFNEALHYYSSLFDSLEDSYSLPSQDRVMSEVYLGRQILNVVAAEGSDRVERHETAAQWRIRMKSAGFDPIHLGSSAFKQASMLLSLYATGDGYRVEENDGCLMIGWQTRPLITTSAWKLA

SEQ ID NO: 34051 - protein, 506 aa, Arabidopsis thaliana
  misc_feature (1)..(506): Ceres Seq. ID no. 13604924
MDDELLAVLGYKVRSSEMAEVAQKLEQLEMVLSNDDVGSTVLNDSVHYNPSDLSNWVESMLSELNNPASSDLDTTRSCVDRSEYDLRAIPGLSAFPKEEEVFDEEASSKRIRLGSWCESSDESTRSVVLVDSQETGVRLVHALVACAEAIHQENLNLADALVKRVGTLAGSQAGAMGKVATYFAQALARRIYRDYTAETDVCAAVNPSFEEVLEMHFYESCPYLKFAHFTANQAILEAVTTARRVHVIDLGLNQGMQWPALMQALALRPGGPPSFRLTGIGPPQTENSDSLQQLGWKLAQFAQNMGVEFEFKGLAAESLSDLEPEMFETRPESETLVVNSVFELHRLLARSGSIEKLLNTVKAIKPSIVTVVEQEANHNGIVFLDRFNEALHYYSSLFDSLEDSYSLPSQDRVMSEVYLGRQILNVVAAEGSDRVERHETAAQWRIRMKSAGFDPIHLGSSAFKQASMLLSLYATGDGYRVEENDGCLMIGWQTRPLITTSAWKLA

SEQ ID NO: 34052 - DNA, 2021 bp, Arabidopsis thaliana
  misc_feature (1)..(2021): Ceres Seq. ID no. 13604933
gttctaagcattgtgtataccaaacacgaaaagatcccttccccctaaaaaaaaaataaaaaaattcagagctagaaggggcctcatagttatagccacagttataggccccatctgctccatttttaacatgtgtagaaaatcatattagaaaagtaggaaaaaatacttgagcaaagatacctttttcgacctttagaatttttgtgaatatataggaaacagaaaaaatgggttctgatggtgacaagaagaagaaattcatcgtcgccggtagtgtctccggttttctagtcatcatggttgtctctgtagccgttgtaacgtctaaacactctcccaaagacgatgaaaatcatatcagaaaaaccaccaaagcggttcaagcagtttgtgcacccactgacttcaaagacacttgtgttaacagcttaatgggtgcttctcccgattccgatgaccctgtcgacctcatcaaactcggcttcaaggtcactatcaaatccatcaacgaaagcctggaaaaggcctctggagatatcaaagccaaggctgacaagaacccagaagcaaagggtgctttcgagctgtgtgagaagctgatgattgatgctatcgatgacttgaagaagtgtatggatcatggattctcggttgatcagatcgaggtctttgttgaggatctacgggtttggctaagtggctccatcgcattccagcaaacatgtatggattcctttggggaaattaagtctaatcttatgcaagacatgctcaagatcttcaaaacatcaagagagcttagtagcaatagccttgccatggttactagaatctccactcttatcccaaactccaaccttacaggactaaccggagctttagcaaagtacgcgagaaagcttctgtctacagaagatagtatcccaacttgggttggaccagaggcacgacggctcatggcagctcaaggaggaggacctggacctgtgaaggctaatgccgtggtggctcaagacggaactggacagttcaagactatcaccgatgctctaaatgctgtgcctaaaggcaacaaagtgccattcatcattcacatcaaagaaggtatctacaaggagaaagttacggtcaccaagaaaatgcctcacgtaactttcatcggcgatgggccaaacaagactctaatcaccggtagtctcaatttcggtatcggcaaggtcaagaccttcctaacagccacaatcacaatcgaaggcgaccacttcacagcgaagaacatcggaatcgagaacacagctggaccagaaggaggacaagcggtggcgttaagagtctcggctgattacgccgtattccacagctgtcaaatcgacgggcaccaagacacgttatacgttcactctcaccggcaattctaccgtgactgcacagtctcgggcaccgtcgatttcatcttcggagacgcgaaatgcatcctccagaactgtaaaatcgtcgtccgaaaacctaacaaaggtcaaacgtgtatggttacagctcagggacgaagtaacgtccgtgaatcgacaggattggtgctccatggctgccatataacgggagatccagcgtatattccgatgaaatctgtgaataaagcttacttaggaagaccgtggaaggagttctcgaggacaatcattatgaaaacgacgatcgatgacgtcatcgatccggcgggatggcttccctggagtggagattttgcgctcaagacgctatactacgccgagcatatgaatactgggcctggatcgaatcaggcccaaagagttaaatggcccggaattaagaaactaacgccccaagatgctcttttatacactggcgacagattcttacgtggcgatacgtggatcccacaaacacaagttccgtatacagctaaagtgtaggagattccaaattttgtaaattgatttaatttgtaaatgttttaaaactaaaaactgtttgaagaatgattaattgattatgtc

SEQ ID NO: 34053 - protein, 568 aa, Arabidopsis thaliana
  misc_feature (1)..(568): Ceres Seq. ID no. 13604934
MGSDGDKKKKFIVAGSVSGFLVIMVVSVAVVTSKHSPKDDENHIRKTTKAVQAVCAPTDFKDTCVNSLMGASPDSDDPVDLIKLGFKVTIKSINESLEKASGDIKAKADKNPEAKGAFELCEKLMIDAIDDLKKCMDHGFSVDQIEVFVEDLRVWLSGSIAFQQTCMDSFGEIKSNLMQDMLKIFKTSRELSSNSLAMVTRISTLIPNSNLTGLTGALAKYARKLLSTEDSIPTWVGPEARRLMAAQGGGPGPVKANAVVAQDGTGQFKTITDALNAVPKGNKVPFIIHIKEGIYKEKVTVTKKMPHVTFIGDGPNKTLITGSLNFGIGKVKTFLTATITIEGDHFTAKNIGIENTAGPEGGQAVALRVSADYAVFHSCQIDGHQDTLYVHSHRQFYRDCTVSGTVDFIFGDAKCILQNCKIVVRKPNKGQTCMVTAQGRSNVRESTGLVLHGCHITGDPAYIPMKSVNKAYLGRPWKEFSRTIIMKTTIDDVIDPAGWLPWSGDFALKTLYYAEHMNTGPGSNQAQRVKWPGIKKLTPQDALLYTGDRFLRGDTWIPQTQVPYTAKV

SEQ ID NO: 34054 - protein, 545 aa, Arabidopsis thaliana
  misc_feature (1)..(545): Ceres Seq. ID no. 13604935
MVVSVAVVTSKHSPKDDENHIRKTTKAVQAVCAPTDFKDTCVNSLMGASPDSDDPVDLIKLGFKVTIKSINESLEKASGDIKAKADKNPEAKGAFELCEKLMIDAIDDLKKCMDHGFSVDQIEVFVEDLRVWLSGSIAFQQTCMDSFGEIKSNLMQDMLKIFKTSRELSSNSLAMVTRISTLIPNSNLTGLTGALAKYARKLLSTEDSIPTWVGPEARRLMAAQGGGPGPVKANAVVAQDGTGQFKTITDALNAVPKGNKVPFIIHIKEGIYKEKVTVTKKMPHVTFIGDGPNKTLITGSLNFGIGKVKTFLTATITIEGDHFTAKNIGIENTAGPEGGQAVALRVSADYAVFHSCQIDGHQDTLYVHSHRQFYRDCTVSGTVDFIFGDAKCILQNCKIVVRKPNKGQTCMVTAQGRSNVRESTGLVLHGCHITGDPAYIPMKSVNKAYLGRPWKEFSRTIIMKTTIDDVIDPAGWLPWSGDFALKTLYYAEHMNTGPGSNQAQRVKWPGIKKLTPQDALLYTGDRFLRGDTWIPQTQVPYTAKV

SEQ ID NO: 34055 - protein, 500 aa, Arabidopsis thaliana
  misc_feature (1)..(500): Ceres Seq. ID no. 13604936
MGASPDSDDPVDLIKLGFKVTIKSINESLEKASGDIKAKADKNPEAKGAFELCEKLMIDAIDDLKKCMDHGFSVDQIEVFVEDLRVWLSGSIAFQQTCMDSFGEIKSNLMQDMLKIFKTSRELSSNSLAMVTRISTLIPNSNLTGLTGALAKYARKLLSTEDSIPTWVGPEARRLMAAQGGGPGPVKANAVVAQDGTGQFKTITDALNAVPKGNKVPFIIHIKEGIYKEKVTVTKKMPHVTFIGDGPNKTLITGSLNFGIGKVKTFLTATITIEGDHFTAKNIGIENTAGPEGGQAVALRVSADYAVFHSCQIDGHQDTLYVHSHRQFYRDCTVSGTVDFIFGDAKCILQNCKIVVRKPNKGQTCMVTAQGRSNVRESTGLVLHGCHITGDPAYIPMKSVNKAYLGRPWKEFSRTIIMKTTIDDVIDPAGWLPWSGDFALKTLYYAEHMNTGPGSNQAQRVKWPGIKKLTPQDALLYTGDRFLRGDTWIPQTQVPYTAKV

SEQ ID NO: 34056 - DNA, 2237 bp, Arabidopsis thaliana
  misc_feature (1)..(2237): Ceres Seq. ID no. 13604939
catcgctgtctggaatgccgaactcaaggaacctcactaaactcaaatcttcctctcagtttctcccactcttcttcctcaaccttccgatttatcggattactctaaaatacccaaaatggaatctcatggaaaaacccatcagaaagagcacgataatgatctctctccgaaacccataacgttgtcaaagtattcgaaacgggtcgagttaaagactctgcttgatcggagcgaccgcggcgcaggattggctgggaaaagggttgtgattggtggttgggttaagtctgctagagcggttaagaaaaattctcctcctcctcctctgcctgtagttgccgccccttcgccgtcgagtggtggggatcaagctcatacgacggccaacattaggtgcacggagataatccaatcgaaaatgaatattttcaagagatttttcgatgtactgagcggtggtggtaagacttatccaatctttgataagacagaactcgccggtcagaaggccgtgccaccaccggagtatgttttttacttcttgatcagtgatggctcctccatctccagtctccaggttgttgttgattctgcgttgtcaactgttccagcaactcagcttatggctctagggacttgtattgtagctgaaggtgtgttaagactaccattggctgcttctgcaaaacatgtaattgagcttgaggcagagaagcttcttcatgttggaacagtggatccagagaagtatccactctcgaagaaacagcttcctctgcatatgcttagagacttctctcatttccgtccccgcacaactacggttgggtcggtgactcgagtccacagtgcgctaaccttagcaagccacacattccttcaataccatgggtttcagtatgttcaagtaccagtcatcacaacaaccactggatttggcgaaatgtttagggtcactactcttttaggtaaaactgatgataaagaggagaagaagcctcctgtccaagaaaaagatggatttagcattgacaccgtaaaggctgtgataaaggaaaagacgaggcttattgatcacctcaagagatccgacagcaaccgagaaaccgtggttgctgctgtacacgacttgaagaaaacgaacgatcttgcatcgcagattgagatgaaacaaaaatccaaaacaggaactttggtcaaacctgagaagcttgatttctcgaaagatttctttggtcgcgacacttatctgactgcttctgggaggtttcatcttgagagctatgcttctgcacttggaaaagtttatacctttggaccaagattcatagctgataaaattgacaatgcaaggcatttggcagagaagtggaatgtggaaaccgaaatggctttcgcggaattggatgatgctatggattgtgctgatgaatacttcaagttcctctgcaaatatgttctggaaaatcgcgatgaagacatgaaattcatatcaaaacgagttgacaagaccatcaccacacgtctcgaagcaacagcatccagctcccttttgagattctcctataccgaagtgattagtcttctgcaaaaggcaaccactacaaaatttgaaaccaagcctgagtggggagttgctttaacaacagagcatctaagttatctgactgatgagatctacaaaggtcctgtaattgtacatacctacccgaaagcaattaaacagttttacgtaaggttgaatgatgataagaagactgtagcagcgtttgatctggtcgtaccaaaggttggtgttgtgatcaccgggagccaaaacgaagaacggtttgagattctggatgcgaggatcggggaatccggattcacgagggagaagttcgagtggtacttagatttaaggaggcatgggacagtgaaacattcaggaataagcctaagcatggaacaaatgcttctgtatgcgaccgggcttcctgatatcaaagatgccattcctttcccaagaagttggggcaaagcaaacaattaaagcagcctcaagctatttatgtacaaacttgaagttacattgttgtgtattctctgtaaccatacttgggtgtgaaataataaggaacccctataccaaattgttcataatcctataccaagttttagtatatttgtattgataacatatctactcaaaattgtactcactgcgactagatttgatgttctatagttgattc

SEQ ID NO: 34057 - protein, 638 aa, Arabidopsis thaliana
  misc_feature (1)..(638): Ceres Seq. ID no. 13604940
MESHGKTHQKEHDNDLSPKPITLSKYSKRVELKTLLDRSDRGAGLAGKRVVIGGWVKSARAVKKNSPPPPLPVVAAPSPSSGGDQAHTTANIRCTEIIQSKMNIFKRFFDVLSGGGKTYPIFDKTELAGQKAVPPPEYVFYFLISDGSSISSLQVVVDSALSTVPATQLMALGTCIVAEGVLRLPLAASAKHVIELEAEKLLHVGTVDPEKYPLSKKQLPLHMLRDFSHFRPRTTTVGSVTRVHSALTLASHTFLQYHGFQYVQVPVITTTTGFGEMFRVTTLLGKTDDKEEKKPPVQEKDGFSIDTVKAVIKEKTRLIDHLKRSDSNRETVVAAVHDLKKTNDLASQIEMKQKSKTGTLVKPEKLDFSKDFFGRDTYLTASGRFHLESYASALGKVYTFGPRFIADKIDNARHLAEKWNVETEMAFAELDDAMDCADEYFKFLCKYVLENRDEDMKFISKRVDKTITTRLEATASSSLLRFSYTEVISLLQKATTTKFETKPEWGVALTTEHLSYLTDEIYKGPVIVHTYPKAIKQFYVRLNDDKKTVAAFDLVVPKVGVVITGSQNEERFEILDARIGESGFTREKFEWYLDLRRHGTVKHSGISLSMEQMLLYATGLPDIKDAIPFPRSWGKANN

SEQ ID NO: 34058 - protein, 537 aa, Arabidopsis thaliana
  misc_feature (1)..(537): Ceres Seq. ID no. 13604941
MNIFKRFFDVLSGGGKTYPIFDKTELAGQKAVPPPEYVFYFLISDGSSISSLQVVVDSALSTVPATQLMALGTCIVAEGVLRLPLAASAKHVIELEAEKLLHVGTVDPEKYPLSKKQLPLHMLRDFSHFRPRTTTVGSVTRVHSALTLASHTFLQYHGFQYVQVPVITTTTGFGEMFRVTTLLGKTDDKEEKKPPVQEKDGFSIDTVKAVIKEKTRLIDHLKRSDSNRETVVAAVHDLKKTNDLASQIEMKQKSKTGTLVKPEKLDFSKDFFGRDTYLTASGRFHLESYASALGKVYTFGPRFIADKIDNARHLAEKWNVETEMAFAELDDAMDCADEYFKFLCKYVLENRDEDMKFISKRVDKTITTRLEATASSSLLRFSYTEVISLLQKATTTKFETKPEWGVALTTEHLSYLTDEIYKGPVIVHTYPKAIKQFYVRLNDDKKTVAAFDLVVPKVGVVITGSQNEERFEILDARIGESGFTREKFEWYLDLRRHGTVKHSGISLSMEQMLLYATGLPDIKDAIPFPRSWGKANN

SEQ ID NO: 34059 - protein, 469 aa, Arabidopsis thaliana
  misc_feature (1)..(469): Ceres Seq. ID no. 13604942
MALGTCIVAEGVLRLPLAASAKHVIELEAEKLLHVGTVDPEKYPLSKKQLPLHMLRDFSHFRPRTTTVGSVTRVHSALTLASHTFLQYHGFQYVQVPVITTTTGFGEMFRVTTLLGKTDDKEEKKPPVQEKDGFSIDTVKAVIKEKTRLIDHLKRSDSNRETVVAAVHDLKKTNDLASQIEMKQKSKTGTLVKPEKLDFSKDFFGRDTYLTASGRFHLESYASALGKVYTFGPRFIADKIDNARHLAEKWNVETEMAFAELDDAMDCADEYFKFLCKYVLENRDEDMKFISKRVDKTITTRLEATASSSLLRFSYTEVISLLQKATTTKFETKPEWGVALTTEHLSYLTDEIYKGPVIVHTYPKAIKQFYVRLNDDKKTVAAFDLVVPKVGVVITGSQNEERFEILDARIGESGFTREKFEWYLDLRRHGTVKHSGISLSMEQMLLYATGLPDIKDAIPFPRSWGKANN

SEQ ID NO: 34060 - DNA, 1742 bp, Arabidopsis thaliana
  misc_feature (1)..(1742): Ceres Seq. ID no. 13604949
aaaataatatttattattgccattgaaaaagactcatttgatcgagagagaaaaagaatcatttgaaccaaaagcatctttttctatcttttcaaatgcttacttccttcaaatcctctagctcctcctccgaagatgccaccgctaccaccaccgagaatcctcctcctttgtgcatcgcctcctcctcggccgcaacctccgcctcacatcacctccgtcgtcttcttttcaccgctgcgaatttcgtctcccagtcaaacttcaccgccgctcaaaacttactctcaatcctctcccttaactcttctcctcacggcgactccaccgagcgacttgtacacctcttcactaaagccttgtccgtacgaatcaaccgtcagcaacaagatcagacggctgaaacggttgccacgtggacgacgaacgaaatgacgatgagtaactccacggtgttcacgagcagtgtatgcaaagaacagttcttgtttcgaaccaagaacaacaattctgacttcgagtcttgttactatctttggctaaaccaactaacgccgtttattcggttcggtcatttaacggcgaaccaagctatcctcgacgcgacggagacaaacgataacggagctctacatatacttgatttagatatatcacaaggacttcaatggcctccattgatgcaagccctagcagagaggtcatcaaaccctagcagtccacctccatctctccgcataaccggatgcggtcgagatgtaaccggattaaaccgaactggagaccggttaacccggttcgctgactctttaggtctccaattccagtttcacacgctagtgatcgtagaagaagatctcgccggacttttgctacagatccgattgttagctctctcagccgtacaaggagagaccattgccgtcaattgtgttcacttcctccacaaaatatttaacgacgatggagatatgatcggtcacttcttgtcagcgatcaagagcttaaactctagaatcgttacaatggcagagagagaagctaatcatggagatcactcgttcttgaatagattctctgaggcagtggatcattacatggcgatctttgattcgttggaagcgacgttgccgccaaatagccgagagagactaaccctagagcaacggtggttcggtaaggagattttggatgttgtggcggcggaagagacggagagaaagcaaagacatcggaggtttgagatttgggaagagatgatgaagaggtttggtttcgttaacgttcctattggaagctttgctttgtctcaagctaagcttcttcttagacttcattatccttcagaaggttataatcttcagttccttaacaattctttgtttcttggctggcaaaatcgtcccctcttctccgtttcgtcgtggaaatgatccaaagagaaggacaaaaaaacctatatatctaggtatatagtagacaaaaaaaaagatcgataatttttggtgttagggcaaaaaatgattaagcagatgatggaagaggacgatggctccggcgaagattgtcgacgccggcggattcttgggatgtgtgtctttttgtttcttgggaagctcaaacaaagagacaacctaatcttttgtgtttttaacctactaatatttactaatatctatattttttttgtcaaactcaatcttaggtgtatcgttttgacatatataatcccattctgtctc

SEQ ID NO: 34061 - protein, 445 aa, Arabidopsis thaliana
  misc_feature (1)..(445): Ceres Seq. ID no. 13604950
MLTSFKSSSSSSEDATATTTENPPPLCIASSSAATSASHHLRRLLFTAANFVSQSNFTAAQNLLSILSLNSSPHGDSTERLVHLFTKALSVRINRQQQDQTAETVATWTTNEMTMSNSTVFTSSVCKEQFLFRTKNNNSDFESCYYLWLNQLTPFIRFGHLTANQAILDATETNDNGALHILDLDISQGLQWPPLMQALAERSSNPSSPPPSLRITGCGRDVTGLNRTGDRLTRFADSLGLQFQFHTLVIVEEDLAGLLLQIRLLALSAVQGETIAVNCVHFLHKIFNDDGDMIGHFLSAIKSLNSRIVTMAEREANHGDHSFLNRFSEAVDHYMAIFDSLEATLPPNSRERLTLEQRWFGKEILDVVAAEETERKQRHRRFEIWEEMMKRFGFVNVPIGSFALSQAKLLLRLHYPSEGYNLQFLNNSLFLGWQNRPLFSVSSWK

SEQ ID NO: 34062 - protein, 333 aa, Arabidopsis thaliana
  misc_feature (1)..(333): Ceres Seq. ID no. 13604951
MTMSNSTVFTSSVCKEQFLFRTKNNNSDFESCYYLWLNQLTPFIRFGHLTANQAILDATETNDNGALHILDLDISQGLQWPPLMQALAERSSNPSSPPPSLRITGCGRDVTGLNRTGDRLTRFADSLGLQFQFHTLVIVEEDLAGLLLQIRLLALSAVQGETIAVNCVHFLHKIFNDDGDMIGHFLSAIKSLNSRIVTMAEREANHGDHSFLNRFSEAVDHYMAIFDSLEATLPPNSRERLTLEQRWFGKEILDVVAAEETERKQRHRRFEIWEEMMKRFGFVNVPIGSFALSQAKLLLRLHYPSEGYNLQFLNNSLFLGWQNRPLFSVSSWK

SEQ ID NO: 34063 - protein, 331 aa, Arabidopsis thaliana
  misc_feature (1)..(331): Ceres Seq. ID no. 13604952
MSNSTVFTSSVCKEQFLFRTKNNNSDFESCYYLWLNQLTPFIRFGHLTANQAILDATETNDNGALHILDLDISQGLQWPPLMQALAERSSNPSSPPPSLRITGCGRDVTGLNRTGDRLTRFADSLGLQFQFHTLVIVEEDLAGLLLQIRLLALSAVQGETIAVNCVHFLHKIFNDDGDMIGHFLSAIKSLNSRIVTMAEREANHGDHSFLNRFSEAVDHYMAIFDSLEATLPPNSRERLTLEQRWFGKEILDVVAAEETERKQRHRRFEIWEEMMKRFGFVNVPIGSFALSQAKLLLRLHYPSEGYNLQFLNNSLFLGWQNRPLFSVSSWK

SEQ ID NO: 34064 - DNA, 499 bp, Arabidopsis thaliana
  misc_feature (1)..(499): Ceres Seq. ID no. 13604965
gcctcttgtaaatcacactactcggctctttagaggttctttggacgatgaaacaactaatccgccgtttatcgcgtgtcgcggactcaacacagtatagcctcctccggtctgaatcccagcgtggccgcaccaagaaggagaaacacaaatcttgggttcccgaggggcacgtgcctgtttacgtaggccacgagatggagcggttcgtggtgaatgcggagctgctcaaccaccccgttttcgtagcgttgctgaagcagtcggctcaagagtatggatacgagcaacaaggagtgcttcgcatcccttgccacgtgcttgtgttcgaacgcatcttggagtctctccgtctcggactcgccgatcgagtcacatgacctacacgatctcttttgagatttaagaagtttctagtgtcttatagtatcttgctagctataggggaaacagagttatgtaaattacatattctttatctaattggtttatcagatct

SEQ ID NO: 34065 - protein, 110 aa, Arabidopsis thaliana
  misc_feature (1)..(110): Ceres Seq. ID no. 13604966
MKQLIRRLSRVADSTQYSLLRSESQRGRTKKEKHKSWVPEGHVPVYVGHEMERFVVNAELLNHPVFVALLKQSAQEYGYEQQGVLRIPCHVLVFERILESLRLGLADRVT

SEQ ID NO: 34066 - protein, 60 aa, Arabidopsis thaliana
  misc_feature (1)..(60): Ceres Seq. ID no. 13604967
MERFVVNAELLNHPVFVALLKQSAQEYGYEQQGVLRIPCHVLVFERILESLRLGLADRVT

SEQ ID NO: 34067 - DNA, 924 bp, Arabidopsis thaliana
  misc_feature (1)..(924): Ceres Seq. ID no. 13604976
ccacgcgtccgtaccttttacaatttgtttatatattttacgtatctatctttgttccatggagggttcgtccaaagggctgcgaaaaggtgcttggactactgaagaagatagtctcttgagacagtgcattaataagtatggagaaggcaaatggcaccaagttcctgtaagagctgggctaaaccggtgcaggaaaagttgtagattaagatggttgaactatttgaagccaagtatcaagagaggaaaacttagctctgatgaagtcgatcttcttcttcgccttcataggcttctagggaataggtggtctttaattgctggaagattacctggtcggaccgcaaatgacgtcaagaattactggaacactcatctgagtaagaaacatgaaccgtgttgtaagataaagatgaaaaagagagacattacgcccattcctacaacaccggcactaaaaaacaatgtttataagcctcgacctcgatccttcacagttaacaacgactgcaaccatctcaatgccccaccaaaagttgacgttaatcctccatgccttggacttaacatcaataatgtttgtgacaatagtatcatatacaacaaagataagaagaaagaccaactagtgaataatttgattgatggagataatatgtggttagagaaattcctagaggaaagccaagaggtagatattttggttcctgaagcgacgacaacagaaaagggggacaccttggcttttgacgttgatcaactttggagtcttttcgatggagagactgtgaaatttgattagtgtttcgaacatttgtttgcgtttgtgtataggtttgctttcaccttttaatttgtgtgttttgataaataagctaatagtttttagcattttaatgaaatatttcaagtttccgtgtt

SEQ ID NO: 34068 - protein, 267 aa, Arabidopsis thaliana
  misc_feature (1)..(267): Ceres Seq. ID no. 13604977
HASVPFTICLYILRIYLCSMEGSSKGLRKGAWTTEEDSLLRQCINKYGEGKWHQVPVRAGLNRCRKSCRLRWLNYLKPSIKRGKLSSDEVDLLLRLHRLLGNRWSLIAGRLPGRTANDVKNYWNTHLSKKHEPCCKIKMKKRDITPIPTTPALKNNVYKPRPRSFTVNNDCNHLNAPPKVDVNPPCLGLNINNVCDNSIIYNKDKKKDQLVNNLIDGDNMWLEKFLEESQEVDILVPEATTTEKGDTLAFDVDQLWSLFDGETVKFD

SEQ ID NO: 34069 - protein, 248 aa, Arabidopsis thaliana
  misc_feature (1)..(248): Ceres Seq. ID no. 13604978
MEGSSKGLRKGAWTTEEDSLLRQCINKYGEGKWHQVPVRAGLNRCRKSCRLRWLNYLKPSIKRGKLSSDEVDLLLRLHRLLGNRWSLIAGRLPGRTANDVKNYWNTHLSKKHEPCCKIKMKKRDITPIPTTPALKNNVYKPRPRSFTVNNDCNHLNAPPKVDVNPPCLGLNINNVCDNSIIYNKDKKKDQLVNNLIDGDNMWLEKFLEESQEVDILVPEATTTEKGDTLAFDVDQLWSLFDGETVKFD

SEQ ID NO: 34070 - DNA, 933 bp, Arabidopsis thaliana
  misc_feature (1)..(933): Ceres Seq. ID no. 13604979
atggcaacacaaaacaagattcagaaaaactctctcatcattttcctcttcaccttagtcgtcatcgcccagaccgctacctctcagaactgcctcaccattggttgtcctggcattaacgagtgttgtagccatacgggttactgcggcaccaatgtagagcactgcggcttttggtgcctcagcggcccttgccaactttctaagagttccagctcttacagactcaatgatggcccacgcgggaagatcgaaagcattgttacacctgcattattccacagactcatgcgtaaagtcggaagtaattgcacgggaaaaggtttctacacccgtgaggctttcatcacagcagtcaaatctttcgaaggctacaagggaacggtagctaaacgcgagattgcggccatattggctcagttctcttacgaatctggaaatttttgttacaaagaagaagtaacgagtgagacatattgctcgtcaagcaagacatacccttgtcaatcgggaaagaagtactatggtcgcggtctcttgcagtcaatcaaatggaacgagttctatggtgaggcgggaaagtaccttggcctccctctattgaaagatccagatatggtggctcgtagtccggaagtggctttcaaatttgcaatgtggttttggaagaccgaagttggtccatcactaagactaggatttggagcgaccacgatgaggatcaatggcatagagtgtggtggtatgagttggaatgctgaggctatgcagaacaggattaaccaatacttggagatctgcaagtggtttggggtgaatcctggtaaagatctatattgctaaaaggcattccatgtgatagtacgtttaacttaatttaagttgtcgattgtaatgtttccaataattagaggtttcgattgtggtgtttcc

SEQ ID NO: 34071 - protein, 280 aa, Arabidopsis thaliana
  misc_feature (1)..(280): Ceres Seq. ID no. 13604980
MATQNKIQKNSLIIFLFTLVVIAQTATSQNCLTIGCPGINECCSHTGYCGTNVEHCGFWCLSGPCQLSKSSSSYRLNDGPRGKIESIVTPALFHRLMRKVGSNCTGKGFYTREAFITAVKSFEGYKGTVAKREIAAILAQFSYESGNFCYKEEVTSETYCSSSKTYPCQSGKKYYGRGLLQSIKWNEFYGEAGKYLGLPLLKDPDMVARSPEVAFKFAMWFWKTEVGPSLRLGFGATTMRINGIECGGMSWNAEAMQNRINQYLEICKWFGVNPGKDLYC

SEQ ID NO: 34072 - protein, 184 aa, Arabidopsis thaliana
  misc_feature (1)..(184): Ceres Seq. ID no. 13604981
MRKVGSNCTGKGFYTREAFITAVKSFEGYKGTVAKREIAAILAQFSYESGNFCYKEEVTSETYCSSSKTYPCQSGKKYYGRGLLQSIKWNEFYGEAGKYLGLPLLKDPDMVARSPEVAFKFAMWFWKTEVGPSLRLGFGATTMRINGIECGGMSWNAEAMQNRINQYLEICKWFGVNPGKDLYC

SEQ ID NO: 34073 - DNA, 934 bp, Arabidopsis thaliana
  misc_feature (1)..(934): Ceres Seq. ID no. 13604998
gagggttagttttcgaagaacgacgagctcgagattattgattttcaagtggagattgaatcagtgataatggacaatgagacgaaagcaaccaccttcagcaaatcaacagggcttcctaggaagagattctacagagcaagagctcatagtaacccacttagcgattctcacttcccaatccccatatctccagctcatgtcgactattcacttcacttccccaaattcgttgaagctgacaacaaattcatcaagaaggttgagtttgcggatatcggatgcgggtttggtggcctactaatctcccttgcgacgcttttccccgatacgctaatgatcggtatggagctcagagataaagtgacggagtacgttaaagaacggatcttagctttaaggagaacaagctcggagggacagtatgagaacatctccgttgttaggacaaactcgatgaagtacattccgaattacttcgagaaaggacagctttcgaagatgtttttcctcttccctgatccacattttaaggagaagaatcataggaggagagtgattagtactcatttgttagatgagtatgcttatgttcttagagctggtgggattatttacacaatcactgatgtagaggagcttggagagtggatgaagtcttgcttagagaaacatccgatgtttgaatctctaacacaagaagagcttgtttcggatcctgttgttgagcttctatgcagtgctactgaggaaggacagaaagttgctagaaatggtggacagactttcagagcagtttttagacgcattgcatatgtttcttgaattctttatttctcgttgtagtaatctttgttgtaacacagcttctttcttaatttcaaaattttgggataatattacagaagttgagaaattattgttctacaaagcc

SEQ ID NO: 34074 - protein, 251 aa, Arabidopsis thaliana
  misc_feature (1)..(251): Ceres Seq. ID no. 13604999
MDNETKATTFSKSTGLPRKRFYRARAHSNPLSDSHFPIPISPAHVDYSLHFPKFVEADNKFIKKVEFADIGCGFGGLLISLATLFPDTLMIGMELRDKVTEYVKERILALRRTSSEGQYENISVVRTNSMKYIPNYFEKGQLSKMFFLFPDPHFKEKNHRRRVISTHLLDEYAYVLRAGGIIYTITDVEELGEWMKSCLEKHPMFESLTQEELVSDPVVELLCSATEEGQKVARNGGQTFRAVFRRIAYVS

SEQ ID NO: 34075 - protein, 162 aa, Arabidopsis thaliana
  misc_feature (1)..(162): Ceres Seq. ID no. 13605000
MIGMELRDKVTEYVKERILALRRTSSEGQYENISVVRTNSMKYIPNYFEKGQLSKMFFLFPDPHFKEKNHRRRVISTHLLDEYAYVLRAGGIIYTITDVEELGEWMKSCLEKHPMFESLTQEELVSDPVVELLCSATEEGQKVARNGGQTFRAVFRRIAYVS

SEQ ID NO: 34076 - protein, 159 aa, Arabidopsis thaliana
  misc_feature (1)..(159): Ceres Seq. ID no. 13605001
MELRDKVTEYVKERILALRRTSSEGQYENISVVRTNSMKYIPNYFEKGQLSKMFFLFPDPHFKEKNHRRRVISTHLLDEYAYVLRAGGIIYTITDVEELGEWMKSCLEKHPMFESLTQEELVSDPVVELLCSATEEGQKVARNGGQTFRAVFRRIAYVS

SEQ ID NO: 34077 - DNA, 859 bp, Arabidopsis thaliana
  misc_feature (1)..(859): Ceres Seq. ID no. 13605010
ataagctcttacactcatttcaactctctttttcgtttccattaccctcagaagaagatgaataggccgggagattggaactgcagattgtgtagccacctcaacttccagaggagggattcatgccaacgttgtagagagcctagaccgggcgggatcagtaccgatttactcagcggttttggtggccgtccggttagtagctccttcggtttcaacaccgggcccgatgtgcgacccggggattggtattgcaaccttggggattgtgggacacataattttgccaataggtccagttgtttcaagtgtggtgccgcaaaagatgagttttcatgctcaagtgctgctgcaacaaccgggtttatggacatgaatgttggtccgagacgtggcctttttggttttggcggcagcagtagtggtggtggtggtacgggccgttctccttggaaatctggagattggatttgcccaaggtcaggctgtaacgaacataacttcgcaagcaggtcagagtgtttcaggtgtaacgcaccaaaggaacttgccaccgaaccaccctattagtcatttagtcctcctaccttcttcatcatttccaatactctggaagcattagaggagagcagaaaggtgaagaatcgaagcaagataccgaccgcccttaatctcttgatttgtttaatttcttagatttgactcgttttatatctcgtagtagtcagacctatgttagaatgtaagcatgtcgagagttttccgaagcattttgttctgatatcggtctcctagctagtatgtaagtttgtttgaatgtattcttatttctgataaagttgtttccttctgattccgc

SEQ ID NO: 34078 - protein, 189 aa, Arabidopsis thaliana
  misc_feature (1)..(189): Ceres Seq. ID no. 13605011
ISSYTHFNSLFRFHYPQKKMNRPGDWNCRLCSHLNFQRRDSCQRCREPRPGGISTDLLSGFGGRPVSSSFGFNTGPDVRPGDWYCNLGDCGTHNFANRSSCFKCGAAKDEFSCSSAAATTGFMDMNVGPRRGLFGFGGSSSGGGGTGRSPWKSGDWICPRSGCNEHNFASRSECFRCNAPKELATEPPY

SEQ ID NO: 34079 - protein, 170 aa, Arabidopsis thaliana
  misc_feature (1)..(170): Ceres Seq. ID no. 13605012
MNRPGDWNCRLCSHLNFQRRDSCQRCREPRPGGISTDLLSGFGGRPVSSSFGFNTGPDVRPGDWYCNLGDCGTHNFANRSSCFKCGAAKDEFSCSSAAATTGFMDMNVGPRRGLFGFGGSSSGGGGTGRSPWKSGDWICPRSGCNEHNFASRSECFRCNAPKELATEPPY

SEQ ID NO: 34080 - DNA, 1994 bp, Arabidopsis thaliana
  misc_feature (1)..(1994): Ceres Seq. ID no. 13605032
atggacaccaaaattggagccatcgacacgtgtaagccaacaactggtgacatcggaagtccaccaagcaacgccgtcgcaacaatccaagactccgctcccatcaccacaacctccgaatcgactctaggacgtcacttatcccgccgtcttgtccaagccggagtcaccgatgttttctctgttcccggtgatttcaacctaactcttctcgaccacctcatcgccgagccagagctcaacaacatcggatgctgtaacgagcttaacgccggttacgccgccgatggatacgctcgatctcgtggagtcggtgcttgcgtcgtgactttcaccgttggtggactcagcgttttgaacgctatcgctggtgcgtacagtgagaacctaccagttatatgtatcgttggaggtcctaactccaacgattttggcactaaccggattcttcatcacaccatcggtttacctgactttagccaagagcttaggtgtttccaaactgttacttgctaccaggctgtggtgaacaatttggaggatgctcatgaacagatcgacaaggcgatagcaacagctttgaaagagagcaagcctgtgtacattagcatcagttgcaacttagctgcaactcctcatcctacgtttgctcgtgatcctgtcccttttgacctaactcctaggatgagcaacacgatgggtttagaagctgcggtggaagcaacattggagtttctgaacaaggcagtgaagccagttatggttggtggcccaaagttgcgtgtggctaaagcaagtgaggcctttttggagctagctgatgcttcaggctaccctctcgcagtgatgccttctacaaaaggccttgtaccagagaaccatcctcatttcattggcacttactggggagcagtaagcacacctttctgctctgagattgtcgaatctgcggatgcttacatcttcgcaggtccaatcttcaacgactacagctccgtaggttactctcttctcctcaagaaagaaaaagcaataattgtgcatcctgatcgagtcgttgtggctaatggtccaacgtttggttgcgttctgatgagcgatttcttcagggagttggctaagagggttaagcgtaacgagacagcttatgagaactatgagaggatctttgtacctgaaggtaagccattgaaatgcaaaccaggagagccattgagggtcaacgcaatgttccaacacattcagaagatgctctctagtgaaaccgctgtgattgctgaaactggtgattcttggttcaattgtcagaagctaaagctgcctaaaggatgtgggtacgagtttcagatgcagtatggatccattggttggtctgttggtgcgactctaggatacgcccaagcaaccccggagaagagagtgttgtctttcattggagatgggagtttccaagtgactgctcaggacatatccacgatgattcgtaacggacagaaggcgatcatcttcttgatcaacaacggtggctacaccattgaagttgagattcatgatggtccttacaatgttatcaagaactggaactacactggtcttgtcgatgctattcataacggtgaaggaaaatgctggaccacaaaggtgagatacgaggaggagttagtggaagcgattaagactgcgacaacggagaagaaagatagtctttgtttcattgaagtgattgttcacaaagatgatacaagcaaagagttgcttgagtggggatctcgcgtctcagctgctaatggtcgtcctcccaatcctcagtagaagcaagagaaaagaatcttgagtgtgactcaagcatctctcgtttctttgcaattgaattagattgttttctgttcgaattttcgaattttcgaccgttggttttaattgcttttgatactttccagttagttgtactgtaccattaccattgatggtgtaatacaattccctttttccct

SEQ ID NO: 34081 - protein, 603 aa, Arabidopsis thaliana
  misc_feature (1)..(603): Ceres Seq. ID no. 13605033
MDTKIGAIDTCKPTTGDIGSPPSNAVATIQDSAPITTTSESTLGRHLSRRLVQAGVTDVFSVPGDFNLTLLDHLIAEPELNNIGCCNELNAGYAADGYARSRGVGACVVTFTVGGLSVLNAIAGAYSENLPVICIVGGPNSNDFGTNRILHHTIGLPDFSQELRCFQTVTCYQAVVNNLEDAHEQIDKAIATALKESKPVYISISCNLAATPHPTFARDPVPFDLTPRMSNTMGLEAAVEATLEFLNKAVKPVMVGGPKLRVAKASEAFLELADASGYPLAVMPSTKGLVPENHPHFIGTYWGAVSTPFCSEIVESADAYIFAGPIFNDYSSVGYSLLLKKEKAIIVHPDRVVVANGPTFGCVLMSDFFRELAKRVKRNETAYENYERIFVPEGKPLKCKPGEPLRVNAMFQHIQKMLSSETAVIAETGDSWFNCQKLKLPKGCGYEFQMQYGSIGWSVGATLGYAQATPEKRVLSFIGDGSFQVTAQDISTMIRNGQKAIIFLINNGGYTIEVEIHDGPYNVIKNWNYTGLVDAIHNGEGKCWTTKVRYEEELVEAIKTATTEKKDSLCFIEVIVHKDDTSKELLEWGSRVSAANGRPPNPQ

SEQ ID NO: 34082 - protein, 375 aa, Arabidopsis thaliana
  misc_feature (1)..(375): Ceres Seq. ID no. 13605034
MSNTMGLEAAVEATLEFLNKAVKPVMVGGPKLRVAKASEAFLELADASGYPLAVMPSTKGLVPENHPHFIGTYWGAVSTPFCSEIVESADAYIFAGPIFNDYSSVGYSLLLKKEKAIIVHPDRVVVANGPTFGCVLMSDFFRELAKRVKRNETAYENYERIFVPEGKPLKCKPGEPLRVNAMFQHIQKMLSSETAVIAETGDSWFNCQKLKLPKGCGYEFQMQYGSIGWSVGATLGYAQATPEKRVLSFIGDGSFQVTAQDISTMIRNGQKAIIFLINNGGYTIEVEIHDGPYNVIKNWNYTGLVDAIHNGEGKCWTTKVRYEEELVEAIKTATTEKKDSLCFIEVIVHKDDTSKELLEWGSRVSAANGRPPNPQ

SEQ ID NO: 34083 - protein, 371 aa, Arabidopsis thaliana
  misc_feature (1)..(371): Ceres Seq. ID no. 13605035
MGLEAAVEATLEFLNKAVKPVMVGGPKLRVAKASEAFLELADASGYPLAVMPSTKGLVPENHPHFIGTYWGAVSTPFCSEIVESADAYIFAGPIFNDYSSVGYSLLLKKEKAIIVHPDRVVVANGPTFGCVLMSDFFRELAKRVKRNETAYENYERIFVPEGKPLKCKPGEPLRVNAMFQHIQKMLSSETAVIAETGDSWFNCQKLKLPKGCGYEFQMQYGSIGWSVGATLGYAQATPEKRVLSFIGDGSFQVTAQDISTMIRNGQKAIIFLINNGGYTIEVEIHDGPYNVIKNWNYTGLVDAIHNGEGKCWTTKVRYEEELVEAIKTATTEKKDSLCFIEVIVHKDDTSKELLEWGSRVSAANGRPPNPQ

SEQ ID NO: 34084 - DNA, 1416 bp, Arabidopsis thaliana
  misc_feature (1)..(1416): Ceres Seq. ID no. 13605036
atcatcatcaccctcatcgtcttcttctcttttaccctaatttatcttcttatccccagcgaagttttctcgattttgatctgattggtatagatctccggtgaagtaatacactggagggagatgaagtcatcgagaatgaagtttgcaaagaagttgaaatcaattagagccggagaatatctgaatcaggatcgaattctccaggttctttctgctgcagatgagtttcttccaaagatatctaaccacattcctcagattacatccgccgcttctatctggagaacccctcaaaagtctgaaaatcaaattgcaaatgtaacggaacttttggaaaacgtgagacaaggagaagaagaagcttctggaaattttgtcggcgacgaggagaacgtacggcctccggtgaatcagattccgagagttccgtgtgatcggaaagagagtaaactggcagtttcatgcggatctgatacaggaatcggaagaaagagtttcggatctggatttagaagacctgatttgaattcgaccacacttttcgatccgaaactgttagaagcatttgaattagctgcgttatgctttaggaagattaaggatttttccagagaagccagagtcaatgatgaagacgacatcgtctttcccgaggaagaggaaatcagaaaagacgggaatagcattcctccggtgattagcgtcgtagagtatagacggaaagacgaaaatgtcgtcgttcttcacaaagatgatggaaatgcccttcagattgtaaatgcgatcagggaagaagtcatcggagaagaagacattggaaaagacggaaatacccttatggatccgttgttggaattcgaggaacggtgtcctccgggaggagaggaatccgttgttttctacacaacgactcttcgaggaatcagaaaaacgttcgacgattgcaacatgatccgatttctgctggatagttttaaggttaagtactacgagagagatgtgtcgatgcatagagagtatagagaagagctccgacgaatctcagcggcggaaacagaggtgttgcctccggttctgttcgtaaaaggaaggtgtatcggtggagctcagagagtgttgggactgcacgagcaagggaagtttaagattctctttgagggcattccaatcaccggagatgaacgttgccggcggtgcgatggttttaggtttttgatgtgtgatggatgcagaggtagtcgccggattatctctggtgatggatcaagaattcagtgtttgatatgtaatgagaatgggttaattgtgtgcgttggttgctcctaataccattttttttgtttggtctatatatatcaaattacattattcgtttattatttttcttagtattgtaacgatttttttatacag

SEQ ID NO: 34085 - protein, 401 aa, Arabidopsis thaliana
  misc_feature (1)..(401): Ceres Seq. ID no. 13605037
MKSSRMKFAKKLKSIRAGEYLNQDRILQVLSAADEFLPKISNHIPQITSAASIWRTPQKSENQIANVTELLENVRQGEEEASGNFVGDEENVRPPVNQIPRVPCDRKESKLAVSCGSDTGIGRKSFGSGFRRPDLNSTTLFDPKLLEAFELAALCFRKIKDFSREARVNDEDDIVFPEEEEIRKDGNSIPPVISVVEYRRKDENVVVLHKDDGNALQIVNAIREEVIGEEDIGKDGNTLMDPLLEFEERCPPGGEESVVFYTTTLRGIRKTFDDCNMIRFLLDSFKVKYYERDVSMHREYREELRRISAAETEVLPPVLFVKGRCIGGAQRVLGLHEQGKFKILFEGIPITGDERCRRCDGFRFLMCDGCRGSRRIISGDGSRIQCLICNENGLIVCVGCS

SEQ ID NO: 34086 - protein, 396 aa, Arabidopsis thaliana
  misc_feature (1)..(396): Ceres Seq. ID no. 13605038
MKFAKKLKSIRAGEYLNQDRILQVLSAADEFLPKISNHIPQITSAASIWRTPQKSENQIANVTELLENVRQGEEEASGNFVGDEENVRPPVNQIPRVPCDRKESKLAVSCGSDTGIGRKSFGSGFRRPDLNSTTLFDPKLLEAFELAALCFRKIKDFSREARVNDEDDIVFPEEEEIRKDGNSIPPVISVVEYRRKDENVVVLHKDDGNALQIVNAIREEVIGEEDIGKDGNTLMDPLLEFEERCPPGGEESVVFYTTTLRGIRKTFDDCNMIRFLLDSFKVKYYERDVSMHREYREELRRISAAETEVLPPVLFVKGRCIGGAQRVLGLHEQGKFKILFEGIPITGDERCRRCDGFRFLMCDGCRGSRRIISGDGSRIQCLICNENGLIVCVGCS

SEQ ID NO: 34087 - DNA, 1324 bp, Arabidopsis thaliana
  misc_feature (1)..(1324): Ceres Seq. ID no. 13605059
atgtttaacgttacactcattaagatcgtaccttagggaaaaaaaactcaagagacaaaaaaaaaaggaaggcgcgtcagtgatggagaagattattgacgtagcttatggcgcatcagtgaaggtgggtttgacgttgttggagatgaatctgttgccggatattgtcattaggcggctcacacgtctgcttctggccggtcgtctccgttccggttacaaacccacggcggagatgcaactctccgatctcctccgttttgttgactctataaagaagatgcctatagctatccataccgagaagccaaagactcaacactatgaattaccgacagctttcttcgaacttgtccttggaagaaacatgaagtacagctcttgttacttctcaaacgattcaagtagcttagaagatgcagaggaagcaattttggctctttattgtgaaagagctaaagtggaagatggtcaaagtgttcttgatatcggatgtggctggggatccttgtctttgtacattgcacgcaagtacagcaaatgcaagttaaccggtatctgcaactccaaaacgcagaaagcatttatcgatgagaaatgccggaaactcgggcttcagaatatcgaaatcattgtcgcggatattagcacttttgagcatgaagggacatacgatcggatattctccatcgagatgtttgagcatatgaaaaactatggagagctactaaagaagataggaaagtggatgaaggaagatagtcttctgtttgttcactatttctgccataagacatttgcttaccactttgaggatgtgaatgacgatgactggatcacaagacacttcttcagcggaggaacaatgccatcagcagatcttctgctatattttcaagaaaatgtttcgattgtggatcattggctcgtaagcgggacgcattatgcaaaaacaagtgaagagtggctaaaaagaatggataaggagatagttgcagtaaaaaaaatcatggaagtgacttatgggaaagaagaagcagtgaagtggatggtttactggagaaccttcttcatcgcggttgctgagcttttcggatacaacaatggagaagagtggatggttgcacacttcctcttcaagaagaaatgatgatgatttctttatttttcttccaatttttcaataaagaatacaacaatcccattctactttgtattctatgatgttatggtttcataccaaaggagtttgttcaatctttttaaagtgacaatgttatctcgaaaaacatggggatcaagtatcatgaactggattcttttg

SEQ ID NO: 34088 - protein, 382 aa, Arabidopsis thaliana
  misc_feature (1)..(382): Ceres Seq. ID no. 13605060
CLTLHSLRSYLREKKLKRQKKKEGASVMEKIIDVAYGASVKVGLTLLEMNLLPDIVIRRLTRLLLAGRLRSGYKPTAEMQLSDLLRFVDSIKKMPIAIHTEKPKTQHYELPTAFFELVLGRNMKYSSCYFSNDSSSLEDAEEAILALYCERAKVEDGQSVLDIGCGWGSLSLYIARKYSKCKLTGICNSKTQKAFIDEKCRKLGLQNIEIIVADISTFEHEGTYDRIFSIEMFEHMKNYGELLKKIGKWMKEDSLLFVHYFCHKTFAYHFEDVNDDDWITRHFFSGGTMPSADLLLYFQENVSIVDHWLVSGTHYAKTSEEWLKRMDKEIVAVKKIMEVTYGKEEAVKWMVYWRTFFIAVAELFGYNNGEEWMVAHFLFKKK

SEQ ID NO: 34089 - protein, 355 aa, Arabidopsis thaliana
  misc_feature (1)..(355): Ceres Seq. ID no. 13605061
MEKIIDVAYGASVKVGLTLLEMNLLPDIVIRRLTRLLLAGRLRSGYKPTAEMQLSDLLRFVDSIKKMPIAIHTEKPKTQHYELPTAFFELVLGRNMKYSSCYFSNDSSSLEDAEEAILALYCERAKVEDGQSVLDIGCGWGSLSLYIARKYSKCKLTGICNSKTQKAFIDEKCRKLGLQNIEIIVADISTFEHEGTYDRIFSIEMFEHMKNYGELLKKIGKWMKEDSLLFVHYFCHKTFAYHFEDVNDDDWITRHFFSGGTMPSADLLLYFQENVSIVDHWLVSGTHYAKTSEEWLKRMDKEIVAVKKIMEVTYGKEEAVKWMVYWRTFFIAVAELFGYNNGEEWMVAHFLFKKK

SEQ ID NO: 34090 - protein, 334 aa, Arabidopsis thaliana
  misc_feature (1)..(334): Ceres Seq. ID no. 13605062
MNLLPDIVIRRLTRLLLAGRLRSGYKPTAEMQLSDLLRFVDSIKKMPIAIHTEKPKTQHYELPTAFFELVLGRNMKYSSCYFSNDSSSLEDAEEAILALYCERAKVEDGQSVLDIGCGWGSLSLYIARKYSKCKLTGICNSKTQKAFIDEKCRKLGLQNIEIIVADISTFEHEGTYDRIFSIEMFEHMKNYGELLKKIGKWMKEDSLLFVHYFCHKTFAYHFEDVNDDDWITRHFFSGGTMPSADLLLYFQENVSIVDHWLVSGTHYAKTSEEWLKRMDKEIVAVKKIMEVTYGKEEAVKWMVYWRTFFIAVAELFGYNNGEEWMVAHFLFKKK

SEQ ID NO: 34091 - DNA, 1734 bp, Arabidopsis thaliana
  misc_feature (1)..(1734): Ceres Seq. ID no. 13605074
actttttagcattcttctgtttgtaattttatctcagagcttgcttcatgggcttttgagttttctctctgtttccaaaaaacaatggaaccggagaagaatccgaccacagtattgagtgccattacaagaccttcgtgggcgtttcttctccttgttttcaccgtcttagcgattctctctctccaaatctcttccaattcttttctccctctctggatcccgacttctcaatatgacgaccctgttacctgctccgggtttttcaatcacgacccgttccctaaccggatcgttatgtcgattaccgatttcggcggtgttggagacggaaagacgtcgaacacggccgctttccgccgcgccgtaaggcaccttgaaggttttgcggcggagggtggggcccagctcaatgtcccggagggcacgtggctttctggaagcttcaacctcaccagcaatttcacgctctttctcgaacgcggcgctctcattttgggatccaaggacctagacgaatggccgataatagagccattgccttcttatggaagagggagagagagacctggtggtagacacatcagcctcattcatggagacaatctcactaatgttgtcattacaggagaaaatgggacaattgatggacaggggaaaatgtggtgggagttatggtggaacagaacattggtgcatacgagaggccatcttattgaactcaagaactctcataatatcctcatctctaacctcactttgctcaattctcctttctggacaatccatcctgtttattgcagtaatgttgttattagaaatatgaccatccttgctccgatgaatgctcctaacaccgacggtatagatccagactcaagcaccaatgtctgcattgaggattgttacatcgaaagtggtgatgatcttgtagctgtaaagagcgggtgggatcaatatggaatggctgtggcacgtccgagttcaaacatcgtaatccgaagaatctctggtactactcgcacttgttcaggagttgggataggcagtgagatgtctggtgggattttcaacataaccgttgaagatattcacgtctgggattctgcggctgggctccgcataaaaacagataaagggagaggtgggtacatttcgaatatcacctttaataatgtgttattggagaaagtgaaagttccgattagattcagcagtggctcaaatgatcactcagacgataaatgggatccgaaagctcttccgagagtaaaagggatttacattagcaatgttgtgagtctgaattcgagaaaggcccctatgttgctcggtgttgaaggcacatcgtttcaagacgtatgcttgaggaatgttacgcttcttgggttaccgaagaccgagaaatggaaatgcaaggatgtttctggttacgcgagtgacgtttttcctctgtcatgtccacagttgttgcagaagaaaggttcaatagctcagtgttcatatagatgaggtttgagaaagttttttttttgggtaaagatagagagaggagaccatgagttcgatcaagtttttttgagtgaagattcatggtcacttacgaaaaatgttaaatcttggatttcctttttcacatttttttgttcgtgttttgaatcttgattctttttatacatacattgtgtaacgaaatatactttgaattattccataaaagattttttcttattc

SEQ ID NO: 34092 - protein, 475 aa, Arabidopsis thaliana
  misc_feature (1)..(475): Ceres Seq. ID no. 13605075
MEPEKNPTTVLSAITRPSWAFLLLVFTVLAILSLQISSNSFLPLWIPTSQYDDPVTCSGFFNHDPFPNRIVMSITDFGGVGDGKTSNTAAFRRAVRHLEGFAAEGGAQLNVPEGTWLSGSFNLTSNFTLFLERGALILGSKDLDEWPIIEPLPSYGRGRERPGGRHISLIHGDNLTNVVITGENGTIDGQGKMWWELWWNRTLVHTRGHLIELKNSHNILISNLTLLNSPFWTIHPVYCSNVVIRNMTILAPMNAPNTDGIDPDSSTNVCIEDCYIESGDDLVAVKSGWDQYGMAVARPSSNIVIRRISGTTRTCSGVGIGSEMSGGIFNITVEDIHVWDSAAGLRIKTDKGRGGYISNITFNNVLLEKVKVPIRFSSGSNDHSDDKWDPKALPRVKGIYISNVVSLNSRKAPMLLGVEGTSFQDVCLRNVTLLGLPKTEKWKCKDVSGYASDVFPLSCPQLLQKKGSIAQCSYR

SEQ ID NO: 34093 - protein, 404 aa, Arabidopsis thaliana; identical to SEQ ID NO: 2549
  misc_feature (1)..(404): Ceres Seq. ID no. 13605076

SEQ ID NO: 34094 - protein, 283 aa, Arabidopsis thaliana; identical to SEQ ID NO: 2550
  misc_feature (1)..(283): Ceres Seq. ID no. 13605077

SEQ ID NO: 34095 - DNA, 1729 bp, Arabidopsis thaliana
  misc_feature (1)..(1729): Ceres Seq. ID no. 13605084
tgaaaggaagatgaacagcatcaagaatggcttcttcctctgcatgatttttcttctctggtgccatgtggattcaggggtttccatcgatcctttctcccatagccactctctcaacacagagtgtgtgatgaagcctccacgaagcagtgaaacgaaaggattattacaatttagccgctctctcgaagatgactctgatgaagaatggaaaattgatggaaatggattcattagagaaatggcacagagaattcagcttcaccaaggaaatatttacagcttctctgcttgggtgaaattgagagaaggaaacgacaagaaagtaggagttgtgttcaggacagaaaatggaagacttgttcatggaggtgaagttagggcaaatcaagaatgttggactttgcttaaaggtggcattgtaccagatttttcaggccctgtagatatattcttcgagagtgaaaacagaggagcaaagatctctgcacacaatgtgttgctaaaacagtttagcaaagaagaatggaaactgaaacaggaccaacttattgaaaagataaggaagagcaaagtgagatttgaagtaacttatgagaacaaaaccgcagtaaaaggcgtagtgatatcactaaaacaaaccaaatcatcttttctcttaggctgtggaatgaatttccggatcctacaaagccaagggtacagaaaatggtttgcgtcgcggttcaaaatcacttcattcactaatgaaatgaaatggtatgcaacggagaaagcacgaggtcaagagaactacacggtagccgattcaatgctgaaatttgcggaagataatgggatattggttagaggtcatacagtgttatgggacaacccaaaaatgcagcctagttgggtgaaaaatataaaagatccgaacgatgtgatgaacgtgacattgaacaggatcaactcggttatgaagagatacaaagggaagttaaccgggtgggatgtggttaacgagaatctgcattgggattactttgagaaaatgcttggtgcaaacgcttcgacaagtttctacaatctggcttttaagattgatcctgatgtgagattgtttgttaacgagtacaatacgatagaaaacactaaagagtttactgcgacgccgataaaggtgaagaagatgatggaggaaattctcgcctatccaggaaacaagaacatgaaaggagcaattggagctcagggtcactttggtccaactcagcctaacttagcttacataagatctgcattggatactttaggctcactaggtttgcctatttggcttacagaggttgatatgcctaaatgccctaatcaggcgcaatacgtggaagacattctcagggaagcttactcgcatcctgcggtgaaaggtatcataatatttggtggacctgaggtgtctggttttgacaagctgacacttgcagacaaagacttcaacaacacacaaacgggagatgtaattgataagttgctcaaggagtggcaacaaaaatcttcagagattcaaacgaatttcacagcagattctgataatgaagaggaagaggtctcattgttgcatggacattataatgtgaatgtaagccatccatggatagcaaacctatccaccagtttcagcttggaggtaactaaggagatggatcaagaccaggtgattagagtcgtaattagtgcttgaaattgc

SEQ ID NO: 34096 - protein, 573 aa, Arabidopsis thaliana
  misc_feature (1)..(573): Ceres Seq. ID no. 13605085
ERKMNSIKNGFFLCMIFLLWCHVDSGVSIDPFSHSHSLNTECVMKPPRSSETKGLLQFSRSLEDDSDEEWKIDGNGFIREMAQRIQLHQGNIYSFSAWVKLREGNDKKVGVVFRTENGRLVHGGEVRANQECWTLLKGGIVPDFSGPVDIFFESENRGAKISAHNVLLKQFSKEEWKLKQDQLIEKIRKSKVRFEVTYENKTAVKGVVISLKQTKSSFLLGCGMNFRILQSQGYRKWFASRFKITSFTNEMKWYATEKARGQENYTVADSMLKFAEDNGILVRGHTVLWDNPKMQPSWVKNIKDPNDVMNVTLNRINSVMKRYKGKLTGWDVVNENLHWDYFEKMLGANASTSFYNLAFKIDPDVRLFVNEYNTIENTKEFTATPIKVKKMMEEILAYPGNKNMKGAIGAQGHFGPTQPNLAYIRSALDTLGSLGLPIWLTEVDMPKCPNQAQYVEDILREAYSHPAVKGIIIFGGPEVSGFDKLTLADKDFNNTQTGDVIDKLLKEWQQKSSEIQTNFTADSDNEEEEVSLLHGHYNVNVSHPWIANLSTSFSLEVTKEMDQDQVIRVVISA

SEQ ID NO: 34097 - protein, 570 aa, Arabidopsis thaliana
  misc_feature (1)..(570): Ceres Seq. ID no. 13605086
MNSIKNGFFLCMIFLLWCHVDSGVSIDPFSHSHSLNTECVMKPPRSSETKGLLQFSRSLEDDSDEEWKIDGNGFIREMAQRIQLHQGNIYSFSAWVKLREGNDKKVGVVFRTENGRLVHGGEVRANQECWTLLKGGIVPDFSGPVDIFFESENRGAKISAHNVLLKQFSKEEWKLKQDQLIEKIRKSKVRFEVTYENKTAVKGVVISLKQTKSSFLLGCGMNFRILQSQGYRKWFASRFKITSFTNEMKWYATEKARGQENYTVADSMLKFAEDNGILVRGHTVLWDNPKMQPSWVKNIKDPNDVMNVTLNRINSVMKRYKGKLTGWDVVNENLHWDYFEKMLGANASTSFYNLAFKIDPDVRLFVNEYNTIENTKEFTATPIKVKKMMEEILAYPGNKNMKGAIGAQGHFGPTQPNLAYIRSALDTLGSLGLPIWLTEVDMPKCPNQAQYVEDILREAYSHPAVKGIIIFGGPEVSGFDKLTLADKDFNNTQTGDVIDKLLKEWQQKSSEIQTNFTADSDNEEEEVSLLHGHYNVNVSHPWIANLSTSFSLEVTKEMDQDQVIRVVISA

SEQ ID NO: 34098 - protein, 559 aa, Arabidopsis thaliana
  misc_feature (1)..(559): Ceres Seq. ID no. 13605087
MIFLLWCHVDSGVSIDPFSHSHSLNTECVMKPPRSSETKGLLQFSRSLEDDSDEEWKIDGNGFIREMAQRIQLHQGNIYSFSAWVKLREGNDKKVGVVFRTENGRLVHGGEVRANQECWTLLKGGIVPDFSGPVDIFFESENRGAKISAHNVLLKQFSKEEWKLKQDQLIEKIRKSKVRFEVTYENKTAVKGVVISLKQTKSSFLLGCGMNFRILQSQGYRKWFASRFKITSFTNEMKWYATEKARGQENYTVADSMLKFAEDNGILVRGHTVLWDNPKMQPSWVKNIKDPNDVMNVTLNRINSVMKRYKGKLTGWDVVNENLHWDYFEKMLGANASTSFYNLAFKIDPDVRLFVNEYNTIENTKEFTATPIKVKKMMEEILAYPGNKNMKGAIGAQGHFGPTQPNLAYIRSALDTLGSLGLPIWLTEVDMPKCPNQAQYVEDILREAYSHPAVKGIIIFGGPEVSGFDKLTLADKDFNNTQTGDVIDKLLKEWQQKSSEIQTNFTADSDNEEEEVSLLHGHYNVNVSHPWIANLSTSFSLEVTKEMDQDQVIRVVISA

SEQ ID NO: 34099 - DNA, 1405 bp, Arabidopsis thaliana
  misc_feature (1)..(1405): Ceres Seq. ID no. 13605096
atgggttcatattttggaatttctacaattttcgtgatatgtttgctgggattttcagccaatgctcatgaggtgcttagacttacgtcttctccaggttctgatattacgcaggcgcttctgagagcattcacaacggcatgccaatctccgacaccgaggaaggtggtgatcccaaaaggacagttcaagcttggtgagatcatgatgtcgggtccatgcaaatctccagtcgagatcaccttgctaggcactgtcctcgctgacggaaactcgatccatggaaaagaaaaatgggtcgtgttccaaagaatggatgggttcaggttgaacggaggtggaactttcgacggtgaaggtaacgcagcttggagggtcaataactgtcacaagactttcgagtgcaagaaacttcccatcagtataaggtttgatttcgtgacgaacgctgagatcagagacatatcctcaatcgatgccaagaactttcacatcaacgtgattggcgccaagaacatgacctttgacaacgtcaagatcatggctccagcagagagccccaacactgacgggatccacttgggaagaagtgtcggggtctccattatcaactctaggatctccaccggagatgactgtgtctctgtcggggacgggatggtgaatcttctagttaagaacgtcgtgtgtggtcctggacacgggatcagtgttggaagccttggaaggtacggacatgaacaggacgtcagcggcattagggtcatcaattgcaccctccaggagactgacaatggcctcaggatcaagacttggccctctgcagcttgctccaccactgcctccaatattcattttgagaatatcatccttagaaacgttagtaacccaatcctcatcgaccaagagtactgtccttggaaccagtgcaacaagcagaaatcatcatccattaagctggcaaacataagcttcaggaggattagagggacatcagggaacaaagacgcagtgaagctattgtgcagcaagggatatccgtgtgagaacgttcaggttggagacattaatattcagtacactggagccgatggtccagccaccttcatgtgctcaaacgtaaggcctaagctagttggaactcagttcccaaaggcttgtaacacaccacccgtgctgacccaacctaagtaaaatgtagaaagttctcataacatttaggaatttctcatccattttttcttcaatcttagtttttcccaatgtcacacaagggagatttcttttatttaaaaactgtaaaagaattttgtttcactttttatttgtttgatgccaacacaaatacatagatgtgtgtgcgcatatatgaatgcaataaaactaaaaagatgcaggttatttt

SEQ ID NO: 34100 - protein, 397 aa, Arabidopsis thaliana
  misc_feature (1)..(397): Ceres Seq. ID no. 13605097
MGSYFGISTIFVICLLGFSANAHEVLRLTSSPGSDITQALLRAFTTACQSPTPRKVVIPKGQFKLGEIMMSGPCKSPVEITLLGTVLADGNSIHGKEKWVVFQRMDGFRLNGGGTFDGEGNAAWRVNNCHKTFECKKLPISIRFDFVTNAEIRDISSIDAKNFHINVIGAKNMTFDNVKIMAPAESPNTDGIHLGRSVGVSIINSRISTGDDCVSVGDGMVNLLVKNVVCGPGHGISVGSLGRYGHEQDVSGIRVINCTLQETDNGLRIKTWPSAACSTTASNIHFENIILRNVSNPILIDQEYCPWNQCNKQKSSSIKLANISFRRIRGTSGNKDAVKLLCSKGYPCENVQVGDINIQYTGADGPATFMCSNVRPKLVGTQFPKACNTPPVLTQPK

SEQ ID NO: 34101 - protein, 329 aa, Arabidopsis thaliana
  misc_feature (1)..(329): Ceres Seq. ID no. 13605098
MMSGPCKSPVEITLLGTVLADGNSIHGKEKWVVFQRMDGFRLNGGGTFDGEGNAAWRVNNCHKTFECKKLPISIRFDFVTNAEIRDISSIDAKNFHINVIGAKNMTFDNVKIMAPAESPNTDGIHLGRSVGVSIINSRISTGDDCVSVGDGMVNLLVKNVVCGPGHGISVGSLGRYGHEQDVSGIRVINCTLQETDNGLRIKTWPSAACSTTASNIHFENIILRNVSNPILIDQEYCPWNQCNKQKSSSIKLANISFRRIRGTSGNKDAVKLLCSKGYPCENVQVGDINIQYTGADGPATFMCSNVRPKLVGTQFPKACNTPPVLTQPK

SEQ ID NO: 34102 - protein, 328 aa, Arabidopsis thaliana
  misc_feature (1)..(328): Ceres Seq. ID no. 13605099
MSGPCKSPVEITLLGTVLADGNSIHGKEKWVVFQRMDGFRLNGGGTFDGEGNAAWRVNNCHKTFECKKLPISIRFDFVTNAEIRDISSIDAKNFHINVIGAKNMTFDNVKIMAPAESPNTDGIHLGRSVGVSIINSRISTGDDCVSVGDGMVNLLVKNVVCGPGHGISVGSLGRYGHEQDVSGIRVINCTLQETDNGLRIKTWPSAACSTTASNIHFENIILRNVSNPILIDQEYCPWNQCNKQKSSSIKLANISFRRIRGTSGNKDAVKLLCSKGYPCENVQVGDINIQYTGADGPATFMCSNVRPKLVGTQFPKACNTPPVLTQPK

SEQ ID NO: 34103 - DNA, 2778 bp, Arabidopsis thaliana
  misc_feature (1)..(2778): Ceres Seq. ID no. 13605100
catggccattaccaaactcttcaatttctctatcgattcttcacacaacaacattcctctttcttcccccctttttttcctcgttttcgatttcctcgtctcgtctcttctttctgttgtcttcttcttcgttttctcacgccattccccccaaaaaaagaagcatctcttttatctctctctctctctctcttcgtcgtccttggcctatactacattgaaatccgataagttctgaaagaaacccaacacagtaaatgcggcttcgcgatctaagctatggaggaacgaatgagaaaaaacatagaatccaacaataaaatgtgagaaaagagacagagaaagaaaggaaaaaaaagtgaaatttggaagaaagaagaagagagaaatgtcggtagcacacgcagatgacgccgacgattacagcagaccaacgggagagagttaccacgccgagaaagcattaccaagcggtgatttctacacaggacaatggcgagacaatctccctcacggtcatggcaaatacctttggaccgatggttgtatgtatgtcggagattggcaccgaggcaaaaccatgggcaaaggtcgttttagttggcctagtggtgccacctacgaaggcgatttcaaaaacggctacatggacggcaaaggtacttacattgattcctctggagatttatatagaggatcatgggtgatgaatctgagacatgggcaaggaacgaaaagttacgtcaacggagattgctacgatggagaatggagaagaggtttacaagatggacatgggaggtatcaatggaagaacgagaatcattacattggacaatggaagaatggtttgatgaatggtaacgggacgatgatatggagcaacgggaaccgttacgatgggtcttgggaagacggagctcctaaaggcaatggaactttccgatggtcggatgggagtttctacgttggagtttggagtaaagatcctaaagaacagaacgggacttattacccttcgacttcttccgggaattttgattggcaaccacaacaagtgttttatgttgatttgagtgaatgtgtggtttgtacttgtcagagaatcccggttttgccgtctcagaagatgccggtttggtacggtgcttctgagcagagtagtagtgggaacaggacgaagaacagtgagaggccgaggaggagatctgttgatggaagagtaagtaatggtgaaatggaattgaggagtaatggttctggttatcttcaggtagatgataatgctgagagtactagatcatcactagggcctttgagaatacaacctgctaagaaacaaggacaaactatctctaaaggtcataagaattatgaactcatgcttaacttgcagcttggaattagacattctgttggaagaccagcaccagctacttctcttgatttgaaggcttcagcttttgatccaaaggagaaactttggacgaagtttccatctgaagggtctaaatacactcctccacaccagtcttgtgagtttaaatggaaggattattgtcctgtggttttcaggactctgcggaaactatttagtgtggacgcagcagattatatgttatcgatttgtgggaatgatgctcttagggagctatcatctccagggaaaagtggaagctttttctacttgaccaacgatgaccgctacatgatcaagactatgaagaaggcagaaaccaaagttcttataaggatgcttccggcttactacaatcatgtcagggcgtgtgaaaacactctagttaccaagttcttcggtcttcattgcgtgaaattaactggcactgcacagaaaaaggttcgatttgtgataatgggtaatcttttctgtactggtcactccatccataggcggtttgacctcaaaggatcctctcatggccgtcttactactaaaccagagtccgaaatcgatccaaacacgacgcttaaagatcttgatctaaattttgcattccgattgcaaaagaactggttccaagaattctgcaggcaagtggacagagactgtgaattccttgaacaagagaggattatggattatagtctcttggttggtcttcactttcgagaagctgctatcaaggactctgccactcctacttccggcgctcgaacccctaccggaaattcagaaactcgtctctcccgagcagaaatggaccggtttcttctcgatgccagcaagctagcatcaataaaattgggtataaacatgcctgcaagagttgaaagaacagcgagaagaagtgactgtgagaatcagcttgttggggatccaactggtgaattttacgatgtgatagtgtatttcggtattatagacattctccaagactacgacataagcaagaagcttgaacatgcctacaaatcaatgcagtatgatccgacatcgatctcagccgttgatccgaagcaatactcacgacgattcagggatttcatcttcagggtcttcgttgaagacgcttgagagaacaatcatctaacttgcacgccaaggcccaacaaagttgaggtttttctttttgttagaattttttccttctatatagaaatatctgtaaatttattatgttatttaaccagttcaccaaagtagagaaaaattgattcttttgtaactaaagttcaatactctgcacctttttgttgttgttgttgttgttattctttgtacttcgtttcttcaaacgtgaaagaaagtatgtgtac

SEQ ID NO: 34104 - protein, 715 aa, Arabidopsis thaliana
  misc_feature (1)..(715): Ceres Seq. ID no. 13605101
MSVAHADDADDYSRPTGESYHAEKALPSGDFYTGQWRDNLPHGHGKYLWTDGCMYVGDWHRGKTMGKGRFSWPSGATYEGDFKNGYMDGKGTYIDSSGDLYRGSWVMNLRHGQGTKSYVNGDCYDGEWRRGLQDGHGRYQWKNENHYIGQWKNGLMNGNGTMIWSNGNRYDGSWEDGAPKGNGTFRWSDGSFYVGVWSKDPKEQNGTYYPSTSSGNFDWQPQQVFYVDLSECVVCTCQRIPVLPSQKMPVWYGASEQSSSGNRTKNSERPRRRSVDGRVSNGEMELRSNGSGYLQVDDNAESTRSSLGPLRIQPAKKQGQTISKGHKNYELMLNLQLGIRHSVGRPAPATSLDLKASAFDPKEKLWTKFPSEGSKYTPPHQSCEFKWKDYCPVVFRTLRKLFSVDAADYMLSICGNDALRELSSPGKSGSFFYLTNDDRYMIKTMKKAETKVLIRMLPAYYNHVRACENTLVTKFFGLHCVKLTGTAQKKVRFVIMGNLFCTGHSIHRRFDLKGSSHGRLTTKPESEIDPNTTLKDLDLNFAFRLQKNWFQEFCRQVDRDCEFLEQERIMDYSLLVGLHFREAAIKDSATPTSGARTPTGNSETRLSRAEMDRFLLDASKLASIKLGINMPARVERTARRSDCENQLVGDPTGEFYDVIVYFGIIDILQDYDISKKLEHAYKSMQYDPTSISAVDPKQYSRRFRDFIFRVFVEDA

SEQ ID NO: 34105 - protein, 662 aa, Arabidopsis thaliana
  misc_feature (1)..(662): Ceres Seq. ID no. 13605102
MYVGDWHRGKTMGKGRFSWPSGATYEGDFKNGYMDGKGTYIDSSGDLYRGSWVMNLRHGQGTKSYVNGDCYDGEWRRGLQDGHGRYQWKNENHYIGQWKNGLMNGNGTMIWSNGNRYDGSWEDGAPKGNGTFRWSDGSFYVGVWSKDPKEQNGTYYPSTSSGNFDWQPQQVFYVDLSECVVCTCQRIPVLPSQKMPVWYGASEQSSSGNRTKNSERPRRRSVDGRVSNGEMELRSNGSGYLQVDDNAESTRSSLGPLRIQPAKKQGQTISKGHKNYELMLNLQLGIRHSVGRPAPATSLDLKASAFDPKEKLWTKFPSEGSKYTPPHQSCEFKWKDYCPVVFRTLRKLFSVDAADYMLSICGNDALRELSSPGKSGSFFYLTNDDRYMIKTMKKAETKVLIRMLPAYYNHVRACENTLVTKFFGLHCVKLTGTAQKKVRFVIMGNLFCTGHSIHRRFDLKGSSHGRLTTKPESEIDPNTTLKDLDLNFAFRLQKNWFQEFCRQVDRDCEFLEQERIMDYSLLVGLHFREAAIKDSATPTSGARTPTGNSETRLSRAEMDRFLLDASKLASIKLGINMPARVERTARRSDCENQLVGDPTGEFYDVIVYFGIIDILQDYDISKKLEHAYKSMQYDPTSISAVDPKQYSRRFRDFIFRVFVEDA

SEQ ID NO: 34106 - protein, 651 aa, Arabidopsis thaliana
  misc_feature (1)..(651): Ceres Seq. ID no. 13605103
MGKGRFSWPSGATYEGDFKNGYMDGKGTYIDSSGDLYRGSWVMNLRHGQGTKSYVNGDCYDGEWRRGLQDGHGRYQWKNENHYIGQWKNGLMNGNGTMIWSNGNRYDGSWEDGAPKGNGTFRWSDGSFYVGVWSKDPKEQNGTYYPSTSSGNFDWQPQQVFYVDLSECVVCTCQRIPVLPSQKMPVWYGASEQSSSGNRTKNSERPRRRSVDGRVSNGEMELRSNGSGYLQVDDNAESTRSSLGPLRIQPAKKQGQTISKGHKNYELMLNLQLGIRHSVGRPAPATSLDLKASAFDPKEKLWTKFPSEGSKYTPPHQSCEFKWKDYCPVVFRTLRKLFSVDAADYMLSICGNDALRELSSPGKSGSFFYLTNDDRYMIKTMKKAETKVLIRMLPAYYNHVRACENTLVTKFFGLHCVKLTGTAQKKVRFVIMGNLFCTGHSIHRRFDLKGSSHGRLTTKPESEIDPNTTLKDLDLNFAFRLQKNWFQEFCRQVDRDCEFLEQERIMDYSLLVGLHFREAAIKDSATPTSGARTPTGNSETRLSRAEMDRFLLDASKLASIKLGINMPARVERTARRSDCENQLVGDPTGEFYDVIVYFGIIDILQDYDISKKLEHAYKSMQYDPTSISAVDPKQYSRRFRDFIFRVFVEDA

SEQ ID NO: 34107 - DNA, 741 bp, Arabidopsis thaliana
  misc_feature (1)..(741): Ceres Seq. ID no. 13605128
atggtgaagaagagttacccggaagtgaaagaagagtacaagaaagctgttcagagatgcaagaggaagctccgtggtcttattgccgagaagcactgtgctcccatcgtcctccgtcttgcatggcactcggctgggacatttgatgtgaagacgaagacaggaggaccgtttgggacgataaggcatccccaagagctagcccatgatgccaacaatggtcttgatattgccgttaggcttcttgaccctatcaaggagctgttccctattctgtcatatgctgacttctaccagctagctggagtagttgctgttgagatcactggaggaccagagattccatttcatcctggtagactggacaaagttgagccacctcctgaaggtcgtctgcctcaggccaccaaaggtgtggatcatctaagagatgtgtttggtcggatgggactcaatgacaaagatatcgttgcattgtctggtggacacaccttgggtcggtgccacaaggagcgttcaggattcgagggtgcatggacaccaaacccgctcatttttgacaactcctatttcaaagagatactaagcggagagaaagaaggacttcttcaactaccaaccgacaaggctcttcttgatgatcctctctttctcccatttgttgaaaaatatgctgcagatgaggatgccttcttcgaagactatacggaagctcatctaaagttgtcagaactcgggtaa

SEQ ID NO: 34108 - protein, 246 aa, Arabidopsis thaliana
  misc_feature (1)..(246): Ceres Seq. ID no. 13605129
MVKKSYPEVKEEYKKAVQRCKRKLRGLIAEKHCAPIVLRLAWHSAGTFDVKTKTGGPFGTIRHPQELAHDANNGLDIAVRLLDPIKELFPILSYADFYQLAGVVAVEITGGPEIPFHPGRLDKVEPPPEGRLPQATKGVDHLRDVFGRMGLNDKDIVALSGGHTLGRCHKERSGFEGAWTPNPLIFDNSYFKEILSGEKEGLLQLPTDKALLDDPLFLPFVEKYAADEDAFFEDYTEAHLKLSELG

SEQ ID NO: 34109 - DNA, 929 bp, Arabidopsis thaliana
  misc_feature (1)..(929): Ceres Seq. ID no. 13605144
atcttttgggagaggagaaagaaaaagaaaatgggaagagggagagtagaattgaagaggatagagaacaagatcaataggcaagtgacgtttgcaaagagaaggaatggtcttttgaagaaagcatacgagctttcagttctatgtgatgcagaagttgctctcatcatcttctcaaatagaggaaagctgtacgagttttgcagtagttcgagcatgcttcggacactggagaggtaccaaaagtgtaactatggagcaccagaacccaatgtgccttcaagagaggccttagcagaacttagtagccagcaggagtatctcaagcttaaggagcgttatgacgccttacagagaacccaaaggaatctgttgggagaagatcttggacctctaagtacaaaggagcttgagtcacttgagagacagcttgattcttccttgaagcagatcagagctctcaggacacagtttatgcttgaccagctcaacgatcttcagagtaaggaacgcatgctgactgagacaaataaaactctaagactaaggttagctgatgggtatcagatgccactccagctgaaccctaaccaagaagaggttgatcactacggtcgtcatcatcatcaacaacaacaacactcccaagctttcttccagcctttggaatgtgaacccattcttcagatcgggtatcaggggcaacaagatggaatgggagcaggaccaagtgtgaataattacatgttgggttggttaccttatgacaccaactctatttgaatctttctcacttaatcaatccctctcttttttttttgacatttttaagatgatgtttctattttattacctctctcatgttttctgtcttgtgtgcatgtgtgtgtgtaatgtttatgcccttctattattcaataattttttcg

SEQ ID NO: 34110 - protein, 260 aa, Arabidopsis thaliana
  misc_feature (1)..(260): Ceres Seq. ID no. 13605145
IFWERRKKKKMGRGRVELKRIENKINRQVTFAKRRNGLLKKAYELSVLCDAEVALIIFSNRGKLYEFCSSSSMLRTLERYQKCNYGAPEPNVPSREALAELSSQQEYLKLKERYDALQRTQRNLLGEDLGPLSTKELESLERQLDSSLKQIRALRTQFMLDQLNDLQSKERMLTETNKTLRLRLADGYQMPLQLNPNQEEVDHYGRHHHQQQQHSQAFFQPLECEPILQIGYQGQQDGMGAGPSVNNYMLGWLPYDTNSI

SEQ ID NO: 34111 - protein, 250 aa, Arabidopsis thaliana
  misc_feature (1)..(250): Ceres Seq. ID no. 13605146
MGRGRVELKRIENKINRQVTFAKRRNGLLKKAYELSVLCDAEVALIIFSNRGKLYEFCSSSSMLRTLERYQKCNYGAPEPNVPSREALAELSSQQEYLKLKERYDALQRTQRNLLGEDLGPLSTKELESLERQLDSSLKQIRALRTQFMLDQLNDLQSKERMLTETNKTLRLRLADGYQMPLQLNPNQEEVDHYGRHHHQQQQHSQAFFQPLECEPILQIGYQGQQDGMGAGPSVNNYMLGWLPYDTNSI

SEQ ID NO: 34112 - protein, 188 aa, Arabidopsis thaliana
  misc_feature (1)..(188): Ceres Seq. ID no. 13605147
MLRTLERYQKCNYGAPEPNVPSREALAELSSQQEYLKLKERYDALQRTQRNLLGEDLGPLSTKELESLERQLDSSLKQIRALRTQFMLDQLNDLQSKERMLTETNKTLRLRLADGYQMPLQLNPNQEEVDHYGRHHHQQQQHSQAFFQPLECEPILQIGYQGQQDGMGAGPSVNNYMLGWLPYDTNSI

SEQ ID NO: 34113 - DNA, 863 bp, Arabidopsis thaliana
  misc_feature (1)..(863): Ceres Seq. ID no. 13605152
aattggtcaaagaaaaaaaaagaaagacaaagaggattgaacggtagacgtagacgccattggagtttgaaagggaattagtcgacgttttatggatcattgtcgtttcggtgtcattttcttcttcttctttcgctagcacgatttaaagcctgactagatccatcatcggccatggaggattctacagccacggctacgtcttcgtcttccactcattatttctccattttcacgaattatcctctcatttccgccgtcacctctttcactatcgctcaattcatcaaactcttcacctcctggtatagggaacggagatgggatctcaaacagcttattgggtctggaggaatgccttcttcgcattcagcgaccgttacagctctcgctgtagctattggtttacaagaaggctttggtggatcacattttgccattgctttgattttggcatctgttgtgatgtatgatgctaccggtgttagattacatgctggtcgtcaagctgaggttctcaatcagattgtatatgaacttcctgcagaacatccgctggctgaaagcagacctttgcgggaacttcttggtcatacccctccccaggtcgttgctggtggaatgcttggaagtgctacagcagtcaccggatacttatttttcaggatagctacaagctaacgtcaagaacatgcatagacacaactcttctgcttcattgcctattgaagccactggagagtaccaaaacagatttacaaccgaatccgagttaaaaatatatttattcttgtttaacattaccattaccatatgtaaagaaatcgtgaaacaccattacaaaaataacgtgattttatttg

SEQ ID NO: 34114 - protein, 168 aa, Arabidopsis thaliana
  misc_feature (1)..(168): Ceres Seq. ID no. 13605153
MEDSTATATSSSSTHYFSIFTNYPLISAVTSFTIAQFIKLFTSWYRERRWDLKQLIGSGGMPSSHSATVTALAVAIGLQEGFGGSHFAIALILASVVMYDATGVRLHAGRQAEVLNQIVYELPAEHPLAESRPLRELLGHTPPQVVAGGMLGSATAVTGYLFFRIATS

SEQ ID NO: 34115 - protein, 108 aa, Arabidopsis thaliana
  misc_feature (1)..(108): Ceres Seq. ID no. 13605154
MPSSHSATVTALAVAIGLQEGFGGSHFAIALILASVVMYDATGVRLHAGRQAEVLNQIVYELPAEHPLAESRPLRELLGHTPPQVVAGGMLGSATAVTGYLFFRIATS

SEQ ID NO: 34116 - DNA, 1103 bp, Arabidopsis thaliana
  misc_feature (1)..(1103): Ceres Seq. ID no. 13605159
gttgtgcaaaagaacagaatgagttctaagtttgatatcggctccttaagcatagtaatgactctgcttatttgcttcttattattatctttggctccaaaacttgaggctgagctcgcaacggtccaacatgctccaaaccccgatggctctatcagttttctggtgattggagattggggtaggcatggactctacaaccaatcccaagttgccctccagatggggagaatcggggaggagatggatatcaattttgtggtatcgacgggtgataacatctacgataacgggatgaaaagtatcgatgatcccgcctttcaactctcctttagtaatatctacacttctcctagcctgcaaaagccttggtaccttgtattggggaatcacgactatagaggagatgttgaggcacaattgagtcctatcctcagatctatggatagccgttggatttgcatgagatccttcatcgttgacgctgagatcgcagagctcttctttgtcgacacaactccttttgtagatgcttatttcctcagtccacaagaccaaacttacgactggagcggcgtatcaccgcgaaaatcctaccttcagaccatcttaacggagttggagatgggtctaagagaatcaagtgcaaaatggaaaattgtggtgggtcaccatgctataaagagtgcttccattcatgggaataccaaagagcttgaatctctcctcttacccatccttgaggcgaataaagttgatctctatatgaacggtcatgatcattgcttgcaacatataagcacatcacaaagcccaattcagtttctaacgagtggtggtgggtcaaaggcatggagaggctattacaattggacaacaccagaggatatgaaatttttctacgatggacaaggtttcatgtcagttaagatcactagatcagaattgagtgtcgttttttatgatgtctccggcaatagtttgcataagtgggacacatcgaaaatgttagactcggatttttatttcccattgtaattcacatgaaaatcagttaaagcacataaattctacatataaataaatatgattactatgagtgg

SEQ ID NO: 34117 - protein, 345 aa, Arabidopsis thaliana
  misc_feature (1)..(345): Ceres Seq. ID no. 13605160
VVQKNRMSSKFDIGSLSIVMTLLICFLLLSLAPKLEAELATVQHAPNPDGSISFLVIGDWGRHGLYNQSQVALQMGRIGEEMDINFVVSTGDNIYDNGMKSIDDPAFQLSFSNIYTSPSLQKPWYLVLGNHDYRGDVEAQLSPILRSMDSRWICMRSFIVDAEIAELFFVDTTPFVDAYFLSPQDQTYDWSGVSPRKSYLQTILTELEMGLRESSAKWKIVVGHHAIKSASIHGNTKELESLLLPILEANKVDLYMNGHDHCLQHISTSQSPIQFLTSGGGSKAWRGYYNWTTPEDMKFFYDGQGFMSVKITRSELSVVFYDVSGNSLHKWDTSKMLDSDFYFPL

SEQ ID NO: 34118 - protein, 339 aa, Arabidopsis thaliana
  misc_feature (1)..(339): Ceres Seq. ID no. 13605161
MSSKFDIGSLSIVMTLLICFLLLSLAPKLEAELATVQHAPNPDGSISFLVIGDWGRHGLYNQSQVALQMGRIGEEMDINFVVSTGDNIYDNGMKSIDDPAFQLSFSNIYTSPSLQKPWYLVLGNHDYRGDVEAQLSPILRSMDSRWICMRSFIVDAEIAELFFVDTTPFVDAYFLSPQDQTYDWSGVSPRKSYLQTILTELEMGLRESSAKWKIVVGHHAIKSASIHGNTKELESLLLPILEANKVDLYMNGHDHCLQHISTSQSPIQFLTSGGGSKAWRGYYNWTTPEDMKFFYDGQGFMSVKITRSELSVVFYDVSGNSLHKWDTSKMLDSDFYFPL

SEQ ID NO: 34119 - protein, 326 aa, Arabidopsis thaliana
  misc_feature (1)..(326): Ceres Seq. ID no. 13605162
MTLLICFLLLSLAPKLEAELATVQHAPNPDGSISFLVIGDWGRHGLYNQSQVALQMGRIGEEMDINFVVSTGDNIYDNGMKSIDDPAFQLSFSNIYTSPSLQKPWYLVLGNHDYRGDVEAQLSPILRSMDSRWICMRSFIVDAEIAELFFVDTTPFVDAYFLSPQDQTYDWSGVSPRKSYLQTILTELEMGLRESSAKWKIVVGHHAIKSASIHGNTKELESLLLPILEANKVDLYMNGHDHCLQHISTSQSPIQFLTSGGGSKAWRGYYNWTTPEDMKFFYDGQGFMSVKITRSELSVVFYDVSGNSLHKWDTSKMLDSDFYFPL

SEQ ID NO: 34120 - DNA, 1467 bp, Arabidopsis thaliana
  misc_feature (1)..(1467): Ceres Seq. ID no. 13605167
atacgcaaacaaagtctcttcctttacccgtctacacgttcgaattttttctccgggtcgggtcaatgtcaagaacgacgagaattgtatataatcgtcgattcacgtggccgggtttatcatttactgctggatctcgttttcaattttgagtcagattccccccaattgagagattctagggttttaagatgattgaacatgggaactctacctttgattaccggagtattagagaagtcgctgcaaacgccggcgccggagccaccgcaggggctatcgcggcgacttttgtttgtccattagatgtgatcaaaacaaggttacaggttcttggtctccctgaagctccagcctctggtcaaagaggtggtgtaatcattacaagtctgaagaatataattaaggaagaaggttataggggaatgtatcgagggctttcaccaaccatcatagctctccttccaaattgggctgtctacttctcagtttatgggaagctaaaggatgtgctgcagtcaagtgatggcaagcttagtattgggtcaaacatgatagctgcagctggtgctggagctgccacatctattgcaactaatccgctttgggttgtcaagacaagattaatgacgcaaggaattaggcctggtgtggtaccttacaaaagtgtaatgtctgcatttagtaggatttgtcatgaagaaggagtgcgagggttgtacagtggcatattgccttctttggcgggagtaagccatgtcgcgatccagtttccagcttatgaaaaaattaagcaatacatggcaaagatggataatacatccgtggagaatctgagtcctgggaatgttgctattgcctcctccatcgcgaaagtgatcgcctctattttgacttacccacacgaggtaattagggcgaagcttcaagaacaagggcagattagaaatgctgagactaagtattcaggagtcattgattgcatcacaaaggtgttcagaagcgaagggattcctgggttgtaccgtggatgtgccactaatctactgaggacaactccatcagcagttattacatttacaacctatgagatgatgcttaggtttttccgacaagttgtgccaccagagactaataggtcggatgatcgcagaagagaagaagaaagaaagaatttagttagccgacgaggagaagaagaagataaagatttgggtttgagagaatcacaaactcaatctaataagatcagcactccccatatccctcttggaagcaaataaaactttttcagactcaagccatgcttcataggttttctttttttcgatgccatgttccaactacgtaatttttccccatgcggtgattgagttgtaaccttttctcgtggttctaacaaatgtgtaaactatcaataaactactttttggcccttttgatgatcagtgagtatttgaagatcgt

SEQ ID NO: 34121 - protein, 363 aa, Arabidopsis thaliana
  misc_feature (1)..(363): Ceres Seq. ID no. 13605168
MIEHGNSTFDYRSIREVAANAGAGATAGAIAATFVCPLDVIKTRLQVLGLPEAPASGQRGGVIITSLKNIIKEEGYRGMYRGLSPTIIALLPNWAVYFSVYGKLKDVLQSSDGKLSIGSNMIAAAGAGAATSIATNPLWVVKTRLMTQGIRPGVVPYKSVMSAFSRICHEEGVRGLYSGILPSLAGVSHVAIQFPAYEKIKQYMAKMDNTSVENLSPGNVAIASSIAKVIASILTYPHEVIRAKLQEQGQIRNAETKYSGVIDCITKVFRSEGIPGLYRGCATNLLRTTPSAVITFTTYEMMLRFFRQVVPPETNRSDDRRREEERKNLVSRRGEEEDKDLGLRESQTQSNKISTPHIPLGSK

SEQ ID NO: 34122 - protein, 285 aa, Arabidopsis thaliana
  misc_feature (1)..(285): Ceres Seq. ID no. 13605169
MYRGLSPTIIALLPNWAVYFSVYGKLKDVLQSSDGKLSIGSNMIAAAGAGAATSIATNPLWVVKTRLMTQGIRPGVVPYKSVMSAFSRICHEEGVRGLYSGILPSLAGVSHVAIQFPAYEKIKQYMAKMDNTSVENLSPGNVAIASSIAKVIASILTYPHEVIRAKLQEQGQIRNAETKYSGVIDCITKVFRSEGIPGLYRGCATNLLRTTPSAVITFTTYEMMLRFFRQVVPPETNRSDDRRREEERKNLVSRRGEEEDKDLGLRESQTQSNKISTPHIPLGSK

SEQ ID NO: 34123 - protein, 243 aa, Arabidopsis thaliana
  misc_feature (1)..(243): Ceres Seq. ID no. 13605170
MIAAAGAGAATSIATNPLWVVKTRLMTQGIRPGVVPYKSVMSAFSRICHEEGVRGLYSGILPSLAGVSHVAIQFPAYEKIKQYMAKMDNTSVENLSPGNVAIASSIAKVIASILTYPHEVIRAKLQEQGQIRNAETKYSGVIDCITKVFRSEGIPGLYRGCATNLLRTTPSAVITFTTYEMMLRFFRQVVPPETNRSDDRRREEERKNLVSRRGEEEDKDLGLRESQTQSNKISTPHIPLGSK

SEQ ID NO: 34124 - DNA, 1305 bp, Arabidopsis thaliana
  misc_feature (1)..(1305): Ceres Seq. ID no. 13605175
atcttcttcgttttcctttttcctcaatcgacgacgatcaatctccaacctccaccgcattgattcctctgcttccggttcaatgtcgctgctaaaccaactcttcaaccgtgggatctttggcgccaaatgcaagacaagcttgaacttggcgatagctcgaatgaaattgctgcaaaacaagagagatatgcagcttaaacatatgaagaaggagatagctcacttcttgcaagctggacaagaacccattgctcgaattcgggtggagcatgtgatcagagaaatgaatttatgggcagcttatgagatattggagctattctgcgagtttatacttgctcgtgttccaattcttgaaagtgaaaaggaatgcccgagagagttgagagaggctattgctagcattatctttgctgctccaaggtgctctgaagtacctgatcttcttcaaataaagaatctgtttggtacaaaatatggaaaagaatttatcatggttgcttctgagcttcgtccggattctggtgtcaatcgtactatcattgagaagctttctcctaccagtccatctggagcggcaaggctcaagatgttaaaggaaattgcgcaggagtacagtttgaattgggattcttctgccacggaagcagagttcatgaagagccatgaagacctactgggtggagctaagcaaatacatcgtcaagatggtatctctgaatctcgaccgtcccaacaaggctacggtcagtcttcggtttctagggaagttgaaagtctgcctgcagaggccacacagagattccaaaagcttcaagctcaaaacccagtgagcaaaagcatgccatcatctaagctgacttcagcctttcaagctcctcctgatactagacggaatcagactgatgtaatggagatagctcgagctgccctagctagcgctgatcgtgcaacagcagctgctcgtgctgctgcgcaactagtgaatgtctcttatggggctactacacccacagtagcagcagaagggaagcccttaaacttaatgtagttgccacgtcgtcatttgtgaataaaagcaactgtatttgcttcatacacagaaagaaggataacgatgttttctttggtacttcataggtttggaaaaatgagtatgctaaagagtattggtagattatgctcgagtgttgtgaccttaggttgattcaaaagacagtgatgtttaaatgtgacatacagatataactctgaagtttgttggttttacaaaatctatgcagaaaaaacaacattatcatg

SEQ ID NO: 34125 - protein, 350 aa, Arabidopsis thaliana
  misc_feature (1)..(350): Ceres Seq. ID no. 13605176
SSSFSFFLNRRRSISNLHRIDSSASGSMSLLNQLFNRGIFGAKCKTSLNLAIARMKLLQNKRDMQLKHMKKEIAHFLQAGQEPIARIRVEHVIREMNLWAAYEILELFCEFILARVPILESEKECPRELREAIASIIFAAPRCSEVPDLLQIKNLFGTKYGKEFIMVASELRPDSGVNRTIIEKLSPTSPSGAARLKMLKEIAQEYSLNWDSSATEAEFMKSHEDLLGGAKQIHRQDGISESRPSQQGYGQSSVSREVESLPAEATQRFQKLQAQNPVSKSMPSSKLTSAFQAPPDTRRNQTDVMEIARAALASADRATAAARAAAQLVNVSYGATTPTVAAEGKPLNLM

SEQ ID NO: 34126 - protein, 323 aa, Arabidopsis thaliana
  misc_feature (1)..(323): Ceres Seq. ID no. 13605177
MSLLNQLFNRGIFGAKCKTSLNLAIARMKLLQNKRDMQLKHMKKEIAHFLQAGQEPIARIRVEHVIREMNLWAAYEILELFCEFILARVPILESEKECPRELREAIASIIFAAPRCSEVPDLLQIKNLFGTKYGKEFIMVASELRPDSGVNRTIIEKLSPTSPSGAARLKMLKEIAQEYSLNWDSSATEAEFMKSHEDLLGGAKQIHRQDGISESRPSQQGYGQSSVSREVESLPAEATQRFQKLQAQNPVSKSMPSSKLTSAFQAPPDTRRNQTDVMEIARAALASADRATAAARAAAQLVNVSYGATTPTVAAEGKPLNLM

SEQ ID NO: 34127 - protein, 296 aa, Arabidopsis thaliana
  misc_feature (1)..(296): Ceres Seq. ID no. 13605178
MKLLQNKRDMQLKHMKKEIAHFLQAGQEPIARIRVEHVIREMNLWAAYEILELFCEFILARVPILESEKECPRELREAIASIIFAAPRCSEVPDLLQIKNLFGTKYGKEFIMVASELRPDSGVNRTIIEKLSPTSPSGAARLKMLKEIAQEYSLNWDSSATEAEFMKSHEDLLGGAKQIHRQDGISESRPSQQGYGQSSVSREVESLPAEATQRFQKLQAQNPVSKSMPSSKLTSAFQAPPDTRRNQTDVMEIARAALASADRATAAARAAAQLVNVSYGATTPTVAAEGKPLNLM

SEQ ID NO: 34128 - DNA, 1022 bp, Arabidopsis thaliana
  misc_feature (1)..(1022): Ceres Seq. ID no. 13605207
aaaacgcaccgctttgtttgattgttcctccttgtccccgagcagagaaatacaaaggaagaagaagaagagttgtttgattatctttaagcaaagaggaaactgttttgcttctagatccgatccaatccaatcaaacaaaggatccgattgatcagaaaaaatccaccaaatttctcaagatcgaaacatataattgaagatgagcgacgtatttgaagggtacgagcgtcaatactgcgagctctcaaccaatctctctagaaaatgtcactctgcatcggttctctccaacggagaggagaagaaggggaagattgctgagatcaagtctggaatagacgaagctgatgtcttgatccggaaaatggatcttgaggcaagaagtttgcagccgagtgctaaagctgtgtgtctttctaaactaagagagtataaatctgatctgaaccaattgaagaaggaattcaaacgagtctcttccgcagatgctaagccgtcttcccgtgaagagttgatggaatccggaatggcggatctgcatgcagtatctgctgatcaaagaggaagattggcaatgtccgtggagaggcttgaccaatcaagtgacagaatcagggagagtagaagactaatgctggagacagaagaggttggcatctcaattgtccaagatttgagtcagcaacgccaaaccctccttcatgcgcacaacaagcttcatggtgtggatgacgccattgacaagagcaagaaggtgttgacggctatgtcaaggagaatgactaggaacaaatggatcattacatcggtaatcgtggctctcgttctcgccatcatcttgatcatctcatacaagctttctcattaatatactcaaaaaacattattcatcgtgattgtgtatatatatatgatggttgatttactttgtaatggcccaagtggttacttgtatttttaagtacgatgtttgtattgaagtggcaacacttttaacattcataaggtttcccaagtct

SEQ ID NO: 34129 - protein, 222 aa, Arabidopsis thaliana
  misc_feature (1)..(222): Ceres Seq. ID no. 13605208
MSDVFEGYERQYCELSTNLSRKCHSASVLSNGEEKKGKIAEIKSGIDEADVLIRKMDLEARSLQPSAKAVCLSKLREYKSDLNQLKKEFKRVSSADAKPSSREELMESGMADLHAVSADQRGRLAMSVERLDQSSDRIRESRRLMLETEEVGISIVQDLSQQRQTLLHAHNKLHGVDDAIDKSKKVLTAMSRRMTRNKWIITSVIVALVLAIILIISYKLSH

SEQ ID NO: 34130 - protein, 167 aa, Arabidopsis thaliana
  misc_feature (1)..(167): Ceres Seq. ID no. 13605209
MDLEARSLQPSAKAVCLSKLREYKSDLNQLKKEFKRVSSADAKPSSREELMESGMADLHAVSADQRGRLAMSVERLDQSSDRIRESRRLMLETEEVGISIVQDLSQQRQTLLHAHNKLHGVDDAIDKSKKVLTAMSRRMTRNKWIITSVIVALVLAIILIISYKLSH

SEQ ID NO: 34131 - protein, 117 aa, Arabidopsis thaliana
  misc_feature (1)..(117): Ceres Seq. ID no. 13605210
MESGMADLHAVSADQRGRLAMSVERLDQSSDRIRESRRLMLETEEVGISIVQDLSQQRQTLLHAHNKLHGVDDAIDKSKKVLTAMSRRMTRNKWIITSVIVALVLAIILIISYKLSH

SEQ ID NO: 34132 - DNA, 868 bp, Arabidopsis thaliana
  misc_feature (1)..(868): Ceres Seq. ID no. 13605211
cttcgtcttccatctctctaccaactccacgatcaacgaaaccaaagatctctcttcaaagcttccaccatgtttctccgatcactcaatctctgtacaatactactcttcctagcgatttcatcacaagtttctcaatctctccacttcgaattgcaatctggtcgaacaaaatgtatatcggaagacataaaaagcaattcaatgaccgtcgggaagtacaccgtcgttaaccctaacgaagctcatccttctcctcaatctcacaagatctccatcagagtgacatcgagttacgggaacacgtatcatcacgcggaagatgtagaatcgggacaattcgcgttcacggcggtggagtctggagattacatggcttgttacacagctgttgatcataaacctgaggttacattgagtattgatttcgattggagaactggtgttcaatctaaaagctggagtagtgttgctaagaagagccaagtcgaagttatggagtttgatgtaaaaagacttattgaaaccgtcaattcgattcatgaagagatgttttatctcagagaaagggaagaagagatgcagaatctgaaccgggctactaactcgaaaatggcgtggttgagtttcctctctcttttcgtatgcttaggagtcgcgggaatgcagtttgtgcatttgaagacgtttttcgagaagaagaaagtcatctaagatggttagatgaaacaaatcccactcttttcttttcccaactcaaaggagtcttctattcctccatgagttttgtacatttagatctttacttttgagtatgtactctcggaactggaaattaaatgaatatgaaagtattgcccctttttgc

SEQ ID NO: 34133 - protein, 237 aa, Arabidopsis thaliana
  misc_feature (1)..(237): Ceres Seq. ID no. 13605212
LRLPSLYQLHDQRNQRSLFKASTMFLRSLNLCTILLFLAISSQVSQSLHFELQSGRTKCISEDIKSNSMTVGKYTVVNPNEAHPSPQSHKISIRVTSSYGNTYHHAEDVESGQFAFTAVESGDYMACYTAVDHKPEVTLSIDFDWRTGVQSKSWSSVAKKSQVEVMEFDVKRLIETVNSIHEEMFYLREREEEMQNLNRATNSKMAWLSFLSLFVCLGVAGMQFVHLKTFFEKKKVI

SEQ ID NO: 34134 - protein, 214 aa, Arabidopsis thaliana
  misc_feature (1)..(214): Ceres Seq. ID no. 13605213
MFLRSLNLCTILLFLAISSQVSQSLHFELQSGRTKCISEDIKSNSMTVGKYTVVNPNEAHPSPQSHKISIRVTSSYGNTYHHAEDVESGQFAFTAVESGDYMACYTAVDHKPEVTLSIDFDWRTGVQSKSWSSVAKKSQVEVMEFDVKRLIETVNSIHEEMFYLREREEEMQNLNRATNSKMAWLSFLSLFVCLGVAGMQFVHLKTFFEKKKVI

SEQ ID NO: 34135 - protein, 169 aa, Arabidopsis thaliana
  misc_feature (1)..(169): Ceres Seq. ID no. 13605214
MTVGKYTVVNPNEAHPSPQSHKISIRVTSSYGNTYHHAEDVESGQFAFTAVESGDYMACYTAVDHKPEVTLSIDFDWRTGVQSKSWSSVAKKSQVEVMEFDVKRLIETVNSIHEEMFYLREREEEMQNLNRATNSKMAWLSFLSLFVCLGVAGMQFVHLKTFFEKKKVI

SEQ ID NO: 34136 - DNA, 899 bp, Arabidopsis thaliana
  misc_feature (1)..(899): Ceres Seq. ID no. 13605225
ctcgatccctcactctctctcgcgtcagtcgttactgctgcaacaaatctgtatttgatttctccattaacaacgaatctaaatggccgctgcttttgcttccagattaacccgaggaggacgttcattgcttggaggtcttaacaatggtggttcgatgaattcttctaatggaatgatgaatgaaagtatcctctctcagcagcagcagagaaggacatttattcagatggggactgttctcaaagtcgtggacaattcaggtgcgaagaaagtgatgtgtattcaagctctaaaggggaaaaaaggagctagacttggagatactatagttgcttcagtgaaagaagcgatgccaaacggtaaagtgaagaaaggagcggttgtgtatggtgtggttgttcgtgctgcgatgcagagaggtcgtgttgatggaagtgaagttaggtttgatgataacgcggttgttcttgttgatagtaaagataagaatactaaaactgatcgccagccgattggtactagagtgtttggtcctgttcctcatgagcttcgcaagaagaaacatctcaagattcttgctttggctcaacacgttgcgtgagatgcaacaaaaccgtaaacctcgtactgtctttttttatgtaaactctagttacccgcatgttttttttttgtgtgttcttaacggaatttagaggcttcaaactttaaaaagtccccacacttttaaagtctctctctattactctcttccctacatttctatctcctttattatacaagtggtatacagactcagatgaagaaccacaaaagagggaggagtgaggcggcacattaaagtccccaatttcgaagacgatctcttctcgagagcctgtctcggagtattaccc

SEQ ID NO: 34137 - protein, 173 aa, Arabidopsis thaliana
  misc_feature (1)..(173): Ceres Seq. ID no. 13605226
MAAAFASRLTRGGRSLLGGLNNGGSMNSSNGMMNESILSQQQQRRTFIQMGTVLKVVDNSGAKKVMCIQALKGKKGARLGDTIVASVKEAMPNGKVKKGAVVYGVVVRAAMQRGRVDGSEVRFDDNAVVLVDSKDKNTKTDRQPIGTRVFGPVPHELRKKKHLKILALAQHVA

SEQ ID NO: 34138 - protein, 148 aa, Arabidopsis thaliana
  misc_feature (1)..(148): Ceres Seq. ID no. 13605227
MNSSNGMMNESILSQQQQRRTFIQMGTVLKVVDNSGAKKVMCIQALKGKKGARLGDTIVASVKEAMPNGKVKKGAVVYGVVVRAAMQRGRVDGSEVRFDDNAVVLVDSKDKNTKTDRQPIGTRVFGPVPHELRKKKHLKILALAQHVA

SEQ ID NO: 34139 - protein, 142 aa, Arabidopsis thaliana
  misc_feature (1)..(142): Ceres Seq. ID no. 13605228
MMNESILSQQQQRRTFIQMGTVLKVVDNSGAKKVMCIQALKGKKGARLGDTIVASVKEAMPNGKVKKGAVVYGVVVRAAMQRGRVDGSEVRFDDNAVVLVDSKDKNTKTDRQPIGTRVFGPVPHELRKKKHLKILALAQHVA

SEQ ID NO: 34140 - DNA, 578 bp, Arabidopsis thaliana
  misc_feature (1)..(578): Ceres Seq. ID no. 13605237
aggaactcatcgccatgggaggatcaaacaagaacctcatattcgtgtacggaacgttaaaaagaaaccatcgaaaccatttcctcctagaagatctgatctcaacaaacgacgccgtttacataggacaacgcacgacccggttacaatacccgctcgttacaggtctctatgggatcccttacttaatcaacaaatccgggtcgggtcaaaagatccgaggcgagctttattcggtttcaaaacgtgggcttgtacgtcttgatgaattggaaggtatcaaagttaatcactacgagagattaccaatagaagttattgaggaagatgatgaagaagaagaatcaaacggtgtcgtcttggctgaggcttattttgctcactttggatttggtgagagattgtgggagaagaaaggtaaatgtgggatgtgtgaatttggtgaaaacgatggcgttttgtatgttcgtcctaaagataggccaatgtttagctctgttcttgatgaaattgaaacttttgtgtcttctagtaatgattgattaccaatttaattcaatgggtatgttcaaaattcc

SEQ ID NO: 34141 - protein, 179 aa, Arabidopsis thaliana
  misc_feature (1)..(179): Ceres Seq. ID no. 13605238
ELIAMGGSNKNLIFVYGTLKRNHRNHFLLEDLISTNDAVYIGQRTTRLQYPLVTGLYGIPYLINKSGSGQKIRGELYSVSKRGLVRLDELEGIKVNHYERLPIEVIEEDDEEEESNGVVLAEAYFAHFGFGERLWEKKGKCGMCEFGENDGVLYVRPKDRPMFSSVLDEIETFVSSSND

SEQ ID NO: 34142 - protein, 175 aa, Arabidopsis thaliana
  misc_feature (1)..(175): Ceres Seq. ID no. 13605239
MGGSNKNLIFVYGTLKRNHRNHFLLEDLISTNDAVYIGQRTTRLQYPLVTGLYGIPYLINKSGSGQKIRGELYSVSKRGLVRLDELEGIKVNHYERLPIEVIEEDDEEEESNGVVLAEAYFAHFGFGERLWEKKGKCGMCEFGENDGVLYVRPKDRPMFSSVLDEIETFVSSSND

SEQ ID NO: 34143 - DNA, 618 bp, Arabidopsis thaliana
  misc_feature (1)..(618): Ceres Seq. ID no. 13605240
acaacacatcaaaagcttgataaagagagagtttttagggttttcttgtacctattataagaaatactctaactgaaactttacttcttcatcaatggcttattctaaggttgcccttctcctcgtcttcaatgtcatcttcttcactttcgtcagctcgacttcggtcccttgtccaccaccaccgcccaagagctaccacaagaagcccgcaacgccatctcttaaacccacttgtaaagacgctcttaaacttaaggtatgtgctaacgtgttggatgtggttaaggtttctctaccaccaacgtccaactgttgcgctcttatcaaaggtctagttgatcttgaagccgcggtctgtctttgcactgccctaaaggctaatgttcttggtatcaaccttaatgttcccatttctttgaacgttgtcctaaaccattgtggtaagaaggttccatctggtttcaaatgtgcctagagattacacattttaaattgaggttctatataccatatttcattcttgtttttcaaattccgcgtttgatgatatctttatctattgttgtaatttgttatatgtttcatatatcaatgaaataaagtgtttcctttttc

SEQ ID NO: 34144 - protein, 127 aa, Arabidopsis thaliana
  misc_feature (1)..(127): Ceres Seq. ID no. 13605241
MAYSKVALLLVFNVIFFTFVSSTSVPCPPPPPKSYHKKPATPSLKPTCKDALKLKVCANVLDVVKVSLPPTSNCCALIKGLVDLEAAVCLCTALKANVLGINLNVPISLNVVLNHCGKKVPSGFKCA

SEQ ID NO: 34145 - protein, 68 aa, Arabidopsis thaliana
  misc_feature (1)..(68): Ceres Seq. ID no. 13605242
MSSSSLSSARLRSLVHHHRPRATTRSPQRHLLNPLVKTLLNLRYVLTCWMWLRFLYHQRPTVALLSKV

SEQ ID NO: 34146 - DNA, 1119 bp, Arabidopsis thaliana
  misc_feature (1)..(1119): Ceres Seq. ID no. 13605246
attaaaaaaagaaaaagaaaaaaactataaacataaacgccaatcgcaactttcttgtctttcaatgggagagaaaggtttgaagcggtctggtgttgcggtggtggttgcattactagccatggttcatgtctctgtttcagttccgttcataatgcttcatgggatctcagctcaatgttctaatgctagggatgctaacttcacacagcttctcactaacctctctggctctcctggcttttgcttagaaattggaaatggagttgccgattcatggttaatgccgcttacacgacaagcggaaatagcgtgtgagaaggtgaagcaaatgaaagagttgagtcaaggatacaacattgttggaagatctcaggggaacctagtggctcgaggcttgatcgagttctgtgacggtggccctccggtttacaactatatatccttggccggtcctcatgctggcatctcctctgttcctatgtgtggttctggtttattctgtaagttagcagatgagctaatcaagggagatatctatagcgacttcattcaagatcatcttgctcctagtggttatctcaaaattcctactgatatgacaaagtacttgggaagctctaagtatttacctaagcttaacaatgagataccagaccaaagaaaccaaacttacaaagaccgtttcaccagtttacataacttggttcttatcaagtttcagggcgacaaggttatagttccaaaagattcatcttggttcgggttttatccggatggtgaattcgaacctcttctctctgctcaacagacaaagctctatacagaggattggatcggtctgaaaacattggatgatgcgggaaaagtgaagtttgtgagtgtagccggtgaacatatcagaatggtagatgaagatgtcgtcaaacacgttgtaccttatctccaggaccaaccgtcttcggtgcaaagcttcaaccgcaagacgaagcagcccttgcatgcttaaaaatagcaaataccacaatagttatacttattcatgcaatatatgtcgaaaaagcttagtgatgattttgtagaatccttattcttatagaaatatatacatacttatct

SEQ ID NO: 34147 - protein, 335 aa, Arabidopsis thaliana
  misc_feature (1)..(335): Ceres Seq. ID no. 13605247
LKKEKEKNYKHKRQSQLSCLSMGEKGLKRSGVAVVVALLAMVHVSVSVPFIMLHGISAQCSNARDANFTQLLTNLSGSPGFCLEIGNGVADSWLMPLTRQAEIACEKVKQMKELSQGYNIVGRSQGNLVARGLIEFCDGGPPVYNYISLAGPHAGISSVPMCGSGLFCKLADELIKGDIYSDFIQDHLAPSGYLKIPTDMTKYLGSSKYLPKLNNEIPDQRNQTYKDRFTSLHNLVLIKFQGDKVIVPKDSSWFGFYPDGEFEPLLSAQQTKLYTEDWIGLKTLDDAGKVKFVSVAGEHIRMVDEDVVKHVVPYLQDQPSSVQSFNRKTKQPLHA

SEQ ID NO: 34148 - protein, 314 aa, Arabidopsis thaliana
  misc_feature (1)..(314): Ceres Seq. ID no. 13605248
MGEKGLKRSGVAVVVALLAMVHVSVSVPFIMLHGISAQCSNARDANFTQLLTNLSGSPGFCLEIGNGVADSWLMPLTRQAEIACEKVKQMKELSQGYNIVGRSQGNLVARGLIEFCDGGPPVYNYISLAGPHAGISSVPMCGSGLFCKLADELIKGDIYSDFIQDHLAPSGYLKIPTDMTKYLGSSKYLPKLNNEIPDQRNQTYKDRFTSLHNLVLIKFQGDKVIVPKDSSWFGFYPDGEFEPLLSAQQTKLYTEDWIGLKTLDDAGKVKFVSVAGEHIRMVDEDVVKHVVPYLQDQPSSVQSFNRKTKQPLHA

SEQ ID NO: 34149 - protein, 295 aa, Arabidopsis thaliana
  misc_feature (1)..(295): Ceres Seq. ID no. 13605249
MVHVSVSVPFIMLHGISAQCSNARDANFTQLLTNLSGSPGFCLEIGNGVADSWLMPLTRQAEIACEKVKQMKELSQGYNIVGRSQGNLVARGLIEFCDGGPPVYNYISLAGPHAGISSVPMCGSGLFCKLADELIKGDIYSDFIQDHLAPSGYLKIPTDMTKYLGSSKYLPKLNNEIPDQRNQTYKDRFTSLHNLVLIKFQGDKVIVPKDSSWFGFYPDGEFEPLLSAQQTKLYTEDWIGLKTLDDAGKVKFVSVAGEHIRMVDEDVVKHVVPYLQDQPSSVQSFNRKTKQPLHA

SEQ ID NO: 34150 - DNA, 3288 bp, Arabidopsis thaliana
  misc_feature (1)..(3288): Ceres Seq. ID no. 13605254
attacttcttcttcttcttccaatggaatctacgccgccaccggatgattgttccgttaaggttgctgttcacatcagaccactcatcggcgacgaaaggattcaaggttgtcaagattgtgtcactgtcgttaccggtaaaccacaggtacaaattggatcacattcttttacatttgatcatgtatatgggagctctggttctccatctactgaaatgtatgaagaatgtgctgcccctcttgttgatggtttatttcaaggctacaatgctaccgttcttgcttatggacaaacgggttccggtaaaacatatacaatgggtactggctgcggagacagcagccagactggtatcatccctcaagttatgaacgctcttttcaccaagatagagactttgaagcagcagattgagtttcagattcatgtttcttttattgagattcataaagaagaggttcaagatttgctggatccttgtactgttaataaatcagacactaataacactggacatgttggtaaggtagcacatgtccctgggaagccaccgatacagattcgagaaacatccaacggtgttatcacactagctggatccacagaagtaagtgttagtacgttgaaagagatggctgcttgccttgaccaaggttcggttagcagggctactggtagtactaacatgaacaatcagtccagtcgttcacatgccattttcactatcaccgtggagcaaatgcgcaaaattaatacggattctcctgaaaacggtgcttacaatgggagcttgaaagaagaatatttgtgtgccaagttgcacttagtagatcttgctggttcagaacgagccaaaagaactggttcagacggtttgagatttaaggaaggagttcacatcaacaaaggcctccttgcgcttggtaatgttatcagtgcgctcggtgatgagaaaaagcgtaaagatggtgcccatgttccctacagagacagtaaacttacacggcttttgcaggattcccttggtggtaacagcagaactgtgatgatagcttgcattagtcctgcagatattaacgcggaggagacacttaacactttgaaatatgcaaaccgtgctcgaaacatccgaaataaacctgttgttaatagagatcctgtgtctagtgagatgctaaaaatgcgtcaacaggtagaatacttgcaggcagaactctccttacggaccggaggatcctcatgtgcagaagtacaggctcttaaagaaaggattgtttggcttgaaactgctaatgaagaactttgccgcgaacttcatgagtaccgtagcagatgtcctggtgtagagcattctgaaaaagactttaaagacataagagctgatgatattgttggttctgtcagacccgatgggctgaaaaggagcttgcacagtatagagtcctctaattaccccatggttgaagccacaacaggtgattcaagggaaattgatgaagaagcaaaggaatgggagcataagctcttgcaaaatagtatggacaaagagttgtatgaactgaaccgccgtctagaggaaaaagagtctgaaatgaagctgtttgacggctatgatccggctgcgttaaagcagcattttggaaagaaaattgcagaggtggaggatgaaaagagatcagttcaggaagaaagaaaccgtttgttggctgaaattgagaaccttgcttctgatggtcaagcacagaagttgcaagatgttcatgctcagaacttaaaagcgcttgaagcacagattctagaccttaagaaaaagcaagagagccaagttcagctactgaaacagaaacaaaagagtgatgacgcggctcggaggttacaagatgaaatccaatccatcaaggcacaaaaggttcaactgcagcacagaatgaaacaagaagcagaacagtttcgacagtggaaagcctcccgagagaaggaacttttgcagttacggaaagaagggagaaagagcgagtatgaaaggcataagctgcaagctttaaatcagcgccagaaaatggttcttcagaggaagacagaagaggctgcaatggctaccaaaaggttgaaagagttgttagaagctcgaaaatcatctcctcgtgaacactcagctggtacaaatggctttggaacaaatggtcagacaaatgagaagtcattgcagcgttggcttgatcatgagttggaagtcatggtaaatgtgcatgaagtacgtcatgagtatgagaaacaaagccacgtacgagctgcactggcggaagagttggctgttttaagacaagtagatgagtttgcagtgaaaggattaagtcctccaagaggaaagaatggctttgctagggcttcatcgttgtcacctaatgcaaggatggcccgtatatcttcacttgagaacatgctcgttatatcttctaattctttagtagcgatggcatcacaactttctgaggcagaagaacgggagcgtgcttttacaaaccgtggtcgctggaaccagctacgatcaatgggagaggcaaagaatttgcttcagtatatgttcaactctcttgcagaaacaaggtgtcaattatgggagaaggatgtagagataaaagaaatgaaagatcagttcaaagaaattgttggtcttctgaggcagagtgagttgagaaggaaagaagcagaaaaggaattaaaattgagggagcaagcaattgcaacttcattaggtacgccgccgagttcagtgaaacatgtagctgaagacttgagcacaccttctccaatgaccgtgccagcacagaaacagctcaaatttacgccagggattgctaacggaaaagtgagaggaccggctgcatttcttgatacaaacaagaagatggtaccgatgggacaagtatcgatgagaaaactatcagccgtaggaaaacagggtgggagactttggaggtggaagagaagtcatcaccagtggattgttcaattcaaatggaaatggcaaaagccatggagactctctgagtggattaggacaagtgacgaaacactcctcaagtcaaaaccccgacttaaggctctacctaataagatcatgtaatcaagttgcttgccgttttctgagagaatcttttagttttcaagctctctctgcctgtgagtatgagacttttatggaaaggatcatacaagtgggtgcaggtaatttatcaatccttcctagattatttaagcaattcggagaggatatcattgtgt

SEQ ID NO: 34151 - protein, 1042 aa, Arabidopsis thaliana
  misc_feature (1)..(1042): Ceres Seq. ID no. 13605255
LLLLLLPMESTPPPDDCSVKVAVHIRPLIGDERIQGCQDCVTVVTGKPQVQIGSHSFTFDHVYGSSGSPSTEMYEECAAPLVDGLFQGYNATVLAYGQTGSGKTYTMGTGCGDSSQTGIIPQVMNALFTKIETLKQQIEFQIHVSFIEIHKEEVQDLLDPCTVNKSDTNNTGHVGKVAHVPGKPPIQIRETSNGVITLAGSTEVSVSTLKEMAACLDQGSVSRATGSTNMNNQSSRSHAIFTITVEQMRKINTDSPENGAYNGSLKEEYLCAKLHLVDLAGSERAKRTGSDGLRFKEGVHINKGLLALGNVISALGDEKKRKDGAHVPYRDSKLTRLLQDSLGGNSRTVMIACISPADINAEETLNTLKYANRARNIRNKPVVNRDPVSSEMLKMRQQVEYLQAELSLRTGGSSCAEVQALKERIVWLETANEELCRELHEYRSRCPGVEHSEKDFKDIRADDIVGSVRPDGLKRSLHSIESSNYPMVEATTGDSREIDEEAKEWEHKLLQNSMDKELYELNRRLEEKESEMKLFDGYDPAALKQHFGKKIAEVEDEKRSVQEERNRLLAEIENLASDGQAQKLQDVHAQNLKALEAQILDLKKKQESQVQLLKQKQKSDDAARRLQDEIQSIKAQKVQLQHRMKQEAEQFRQWKASREKELLQLRKEGRKSEYERHKLQALNQRQKMVLQRKTEEAAMATKRLKELLEARKSSPREHSAGTNGFGTNGQTNEKSLQRWLDHELEVMVNVHEVRHEYEKQSHVRAALAEELAVLRQVDEFAVKGLSPPRGKNGFARASSLSPNARMARISSLENMLVISSNSLVAMASQLSEAEERERAFTNRGRWNQLRSMGEAKNLLQYMFNSLAETRCQLWEKDVEIKEMKDQFKEIVGLLRQSELRRKEAEKELKLREQAIATSLGTPPSSVKHVAEDLSTPSPMTVPAQKQLKFTPGIANGKVRGPAAFLDTNKKMVPMGQVSMRKLSAVGKQGGRLWRWKRSHHQWIVQFKWKWQKPWRLSEWIRTSDETLLKSKPRLKALPNKIM

SEQ ID NO: 34152 - protein, 1035 aa, Arabidopsis thaliana
  misc_feature (1)..(1035): Ceres Seq. ID no. 13605256
MESTPPPDDCSVKVAVHIRPLIGDERIQGCQDCVTVVTGKPQVQIGSHSFTFDHVYGSSGSPSTEMYEECAAPLVDGLFQGYNATVLAYGQTGSGKTYTMGTGCGDSSQTGIIPQVMNALFTKIETLKQQIEFQIHVSFIEIHKEEVQDLLDPCTVNKSDTNNTGHVGKVAHVPGKPPIQIRETSNGVITLAGSTEVSVSTLKEMAACLDQGSVSRATGSTNMNNQSSRSHAIFTITVEQMRKINTDSPENGAYNGSLKEEYLCAKLHLVDLAGSERAKRTGSDGLRFKEGVHINKGLLALGNVISALGDEKKRKDGAHVPYRDSKLTRLLQDSLGGNSRTVMIACISPADINAEETLNTLKYANRARNIRNKPVVNRDPVSSEMLKMRQQVEYLQAELSLRTGGSSCAEVQALKERIVWLETANEELCRELHEYRSRCPGVEHSEKDFKDIRADDIVGSVRPDGLKRSLHSIESSNYPMVEATTGDSREIDEEAKEWEHKLLQNSMDKELYELNRRLEEKESEMKLFDGYDPAALKQHFGKKIAEVEDEKRSVQEERNRLLAEIENLASDGQAQKLQDVHAQNLKALEAQILDLKKKQESQVQLLKQKQKSDDAARRLQDEIQSIKAQKVQLQHRMKQEAEQFRQWKASREKELLQLRKEGRKSEYERHKLQALNQRQKMVLQRKTEEAAMATKRLKELLEARKSSPREHSAGTNGFGTNGQTNEKSLQRWLDHELEVMVNVHEVRHEYEKQSHVRAALAEELAVLRQVDEFAVKGLSPPRGKNGFARASSLSPNARMARISSLENMLVISSNSLVAMASQLSEAEERERAFTNRGRWNQLRSMGEAKNLLQYMFNSLAETRCQLWEKDVEIKEMKDQFKEIVGLLRQSELRRKEAEKELKLREQAIATSLGTPPSSVKHVAEDLSTPSPMTVPAQKQLKFTPGIANGKVRGPAAFLDTNKKMVPMGQVSMRKLSAVGKQGGRLWRWKRSHHQWIVQFKWKWQKPWRLSEWIRTSDETLLKSKPRLKALPNKIM

SEQ ID NO: 34153 - protein, 970 aa, Arabidopsis thaliana
  misc_feature (1)..(970): Ceres Seq. ID no. 13605257
MYEECAAPLVDGLFQGYNATVLAYGQTGSGKTYTMGTGCGDSSQTGIIPQVMNALFTKIETLKQQIEFQIHVSFIEIHKEEVQDLLDPCTVNKSDTNNTGHVGKVAHVPGKPPIQIRETSNGVITLAGSTEVSVSTLKEMAACLDQGSVSRATGSTNMNNQSSRSHAIFTITVEQMRKINTDSPENGAYNGSLKEEYLCAKLHLVDLAGSERAKRTGSDGLRFKEGVHINKGLLALGNVISALGDEKKRKDGAHVPYRDSKLTRLLQDSLGGNSRTVMIACISPADINAEETLNTLKYANRARNIRNKPVVNRDPVSSEMLKMRQQVEYLQAELSLRTGGSSCAEVQALKERIVWLETANEELCRELHEYRSRCPGVEHSEKDFKDIRADDIVGSVRPDGLKRSLHSIESSNYPMVEATTGDSREIDEEAKEWEHKLLQNSMDKELYELNRRLEEKESEMKLFDGYDPAALKQHFGKKIAEVEDEKRSVQEERNRLLAEIENLASDGQAQKLQDVHAQNLKALEAQILDLKKKQESQVQLLKQKQKSDDAARRLQDEIQSIKAQKVQLQHRMKQEAEQFRQWKASREKELLQLRKEGRKSEYERHKLQALNQRQKMVLQRKTEEAAMATKRLKELLEARKSSPREHSAGTNGFGTNGQTNEKSLQRWLDHELEVMVNVHEVRHEYEKQSHVRAALAEELAVLRQVDEFAVKGLSPPRGKNGFARASSLSPNARMARISSLENMLVISSNSLVAMASQLSEAEERERAFTNRGRWNQLRSMGEAKNLLQYMFNSLAETRCQLWEKDVEIKEMKDQFKEIVGLLRQSELRRKEAEKELKLREQAIATSLGTPPSSVKHVAEDLSTPSPMTVPAQKQLKFTPGIANGKVRGPAAFLDTNKKMVPMGQVSMRKLSAVGKQGGRLWRWKRSHHQWIVQFKWKWQKPWRLSEWIRTSDETLLKSKPRLKALPNKIM

SEQ ID NO: 34154 - DNA, 916 bp, Arabidopsis thaliana
  misc_feature (1)..(916): Ceres Seq. ID no. 13605258
atgctaattaagcaacatccaaaacataagtaaaacactattatagaagctcttacaaagaaaaaatatgaagaaagctacggcattgatgaaacatatcgttgcattgttgagttccatggcgaaggcaaaatctatagccataaagaacaaaacgagtgctttcaagacacgagtactcatgttgtctctagtgaaacacaagaaactcgggttccgttccatttccaacaagattcaccacctcttgggccatgcggatcaagacgacgataacgaccaggaccaagacaagaacaaggctatagtcctctacaacagcaaggcatccacaatggctcatcatgaggaatatgacgttcacgaggaggaaagcgacaagtatcctgatctgaggcacacgttgttcgaaggagaggaggacttcggggacttggaggaggaaggtcaaggtagttctgtgatagatatggtgaggacctcgaaggaagaagaaggagagaatttcaagctagaagatgagatcgaccatgtcgcggatctctttatttctaggtttcataagcagatgaagcttcagaaactcttgtccttcaagaggtatcaagaaatgctagcccgaggcacctaaacccatatccatatatatatataaacatgttggcaatagatatgaataatagattcatattatgatctttgctaacgtacgttcttattttgtgttgtctatgataaatccttcgagttctcttattttctaggatcgaaatattacggtctcttagatctgttttcatttaatatgttgaagttgaaggaaggatctgctttgcggaatatgttttcttcctccttgagaccgtactgtgtaagatcttttaagtgttacaatatagagcattattttttggct

SEQ ID NO: 34155 - protein, 187 aa, Arabidopsis thaliana
  misc_feature (1)..(187): Ceres Seq. ID no. 13605259
MKKATALMKHIVALLSSMAKAKSIAIKNKTSAFKTRVLMLSLVKHKKLGFRSISNKIHHLLGHADQDDDNDQDQDKNKAIVLYNSKASTMAHHEEYDVHEEESDKYPDLRHTLFEGEEDFGDLEEEGQGSSVIDMVRTSKEEEGENFKLEDEIDHVADLFISRFHKQMKLQKLLSFKRYQEMLARGT

SEQ ID NO: 34156 - protein, 180 aa, Arabidopsis thaliana
  misc_feature (1)..(180): Ceres Seq. ID no. 13605260
MKHIVALLSSMAKAKSIAIKNKTSAFKTRVLMLSLVKHKKLGFRSISNKIHHLLGHADQDDDNDQDQDKNKAIVLYNSKASTMAHHEEYDVHEEESDKYPDLRHTLFEGEEDFGDLEEEGQGSSVIDMVRTSKEEEGENFKLEDEIDHVADLFISRFHKQMKLQKLLSFKRYQEMLARGT

SEQ ID NO: 34157 - protein, 170 aa, Arabidopsis thaliana
  misc_feature (1)..(170): Ceres Seq. ID no. 13605261
MAKAKSIAIKNKTSAFKTRVLMLSLVKHKKLGFRSISNKIHHLLGHADQDDDNDQDQDKNKAIVLYNSKASTMAHHEEYDVHEEESDKYPDLRHTLFEGEEDFGDLEEEGQGSSVIDMVRTSKEEEGENFKLEDEIDHVADLFISRFHKQMKLQKLLSFKRYQEMLARGT

SEQ ID NO: 34158 - DNA, 2124 bp, Arabidopsis thaliana
  misc_feature (1)..(2124): Ceres Seq. ID no. 13605272
attgactctttttctctatctctctagatcgaaagggaaaaggagatagagattgaagatgcgtgacgcaatcatcgccgatcctcttctggccatcgaccatgaaacagtcgcagagaagaagaaacagagcaaaaatctaaagatttctcttttactgcttctgattctcttagcaacttcaggttattatagctttagtgacaacattacaacagttttcttatcaagacaagctattgatgatgatcatagtcttagccttggaaccatcagtgacgtggttgaatctgagaatggtgttgtggctgctgacgacgctcgatgttccgagatcggtgcctctgttcttagaagtggcggtcatgcggtggacgccgccgtggctattactttatgtgttggtgttgttaatccaatgtctagtggaatcggtggtggttctttcttgattgttagctcgcagaaagattccaaagctgaggcttttgacatgagagaaactgctccattagctgcttctaaggatatgtataagaacgatgctagtgcgaaatcgttgggcgcattgtctatgggagttccgggagagatagctggactttacgaggcttggaaacggtatggccgtcttccgtggaaaccgcttttcgagccggctattaagctggctcgggacggtttcgtggtgtatccgtatctcggaaaggccatatcgaccaaagttgcgatgatacttaaagatccgggtatgcggagtgtcttctcaagaaacggacaggttttgaaaaccggtgagacttgctataacccggagctagctcagagtcttgagactatttctgagcaaggcccgggagcgttctacaacgggacagtaggcgagaagcttgttaaagatgtgaagaaggcgggagggatcataacgatggatgatctaagaagttataaggtccgagttaccgatgcaatgtctgtggatgttatgggttatacggttcatggaatgccgcctccttcgggcggtacagtcggtttttcgatggttatgaatatcttggatagttactcgaatctttacactgcttcgggaagagagctcgggctgcaccgtttgatagaagcaatgaaacatatgtttgcagctcgtatggatcttggagaccctgagttcgttaatgtaacaaactctatgaaccaaatgctctcgaaggctcacgcggaagaaatccaaaagaggattttcgacaacacgacattcccacctgagtactatatgaaccggtggagccaactcagggaccaaggaacgagtcatttctgcgttgtggatgcggatcgcaacagtgtgtcgatgacctcaaccgtgaattaccgttttggtgccggggtgttatcaccttcaactggaattgtacttaacaacgagatggatgatttctcaacacccacggaaatcactcccgacatgcttcctccagcgcctacaaatttcattgaaccaaacaaaagaccattatcttccatgacacctctcgtgatcaccaaggatggtgagttcgtggcagcgcttggaggagctggtggaatgcatataattccagcggtgcttcaagtgtttcttaattgctttgtgttgaatatgaaacctaaagaagcagtagagagtgccagaatataccatagattgataccaaatgttgtttcctatgagaacttcaccacgatcaatggcgatcacataggggtttcagaagataccaagatgtttctagcagagagaggacatgagctaaaggagctatcaggtggagctatagttcaacttattgttcagagtttcaaggaagagaaagaagaagaaatgattattgaaattggaaggaaaatcggaaagaaatcgaaaccattaaagggcttacttactgcagttagtgatcctcgaaaagatggaaagccagctgcagtttgatttcgttattaagctaattacaaatttcctcattcaagtcccattctctatcatgtaaatttgaataaagttacatgagcctcaaagactcagcgtgggatatatacagaagcaaagttgtagttggaaccaagagttgttacattattccc

SEQ ID NO: 34159 - protein, 637 aa, Arabidopsis thaliana
  misc_feature (1)..(637): Ceres Seq. ID no. 13605273
MRDAIIADPLLAIDHETVAEKKKQSKNLKISLLLLLILLATSGYYSFSDNITTVFLSRQAIDDDHSLSLGTISDVVESENGVVAADDARCSEIGASVLRSGGHAVDAAVAITLCVGVVNPMSSGIGGGSFLIVSSQKDSKAEAFDMRETAPLAASKDMYKNDASAKSLGALSMGVPGEIAGLYEAWKRYGRLPWKPLFEPAIKLARDGFVVYPYLGKAISTKVAMILKDPGMRSVFSRNGQVLKTGETCYNPELAQSLETISEQGPGAFYNGTVGEKLVKDVKKAGGIITMDDLRSYKVRVTDAMSVDVMGYTVHGMPPPSGGTVGFSMVMNILDSYSNLYTASGRELGLHRLIEAMKHMFAARMDLGDPEFVNVTNSMNQMLSKAHAEEIQKRIFDNTTFPPEYYMNRWSQLRDQGTSHFCVVDADRNSVSMTSTVNYRFGAGVLSPSTGIVLNNEMDDFSTPTEITPDMLPPAPTNFIEPNKRPLSSMTPLVITKDGEFVAALGGAGGMHIIPAVLQVFLNCFVLNMKPKEAVESARIYHRLIPNVVSYENFTTINGDHIGVSEDTKMFLAERGHELKELSGGAIVQLIVQSFKEEKEEEMIIEIGRKIGKKSKPLKGLLTAVSDPRKDGKPAAV

SEQ ID NO: 34160 - protein, 517 aa, Arabidopsis thaliana
  misc_feature (1)..(517): Ceres Seq. ID no. 13605274
MSSGIGGGSFLIVSSQKDSKAEAFDMRETAPLAASKDMYKNDASAKSLGALSMGVPGEIAGLYEAWKRYGRLPWKPLFEPAIKLARDGFVVYPYLGKAISTKVAMILKDPGMRSVFSRNGQVLKTGETCYNPELAQSLETISEQGPGAFYNGTVGEKLVKDVKKAGGIITMDDLRSYKVRVTDAMSVDVMGYTVHGMPPPSGGTVGFSMVMNILDSYSNLYTASGRELGLHRLIEAMKHMFAARMDLGDPEFVNVTNSMNQMLSKAHAEEIQKRIFDNTTFPPEYYMNRWSQLRDQGTSHFCVVDADRNSVSMTSTVNYRFGAGVLSPSTGIVLNNEMDDFSTPTEITPDMLPPAPTNFIEPNKRPLSSMTPLVITKDGEFVAALGGAGGMHIIPAVLQVFLNCFVLNMKPKEAVESARIYHRLIPNVVSYENFTTINGDHIGVSEDTKMFLAERGHELKELSGGAIVQLIVQSFKEEKEEEMIIEIGRKIGKKSKPLKGLLTAVSDPRKDGKPAAV

SEQ ID NO: 34161 - protein, 492 aa, Arabidopsis thaliana
  misc_feature (1)..(492): Ceres Seq. ID no. 13605275
MRETAPLAASKDMYKNDASAKSLGALSMGVPGEIAGLYEAWKRYGRLPWKPLFEPAIKLARDGFVVYPYLGKAISTKVAMILKDPGMRSVFSRNGQVLKTGETCYNPELAQSLETISEQGPGAFYNGTVGEKLVKDVKKAGGIITMDDLRSYKVRVTDAMSVDVMGYTVHGMPPPSGGTVGFSMVMNILDSYSNLYTASGRELGLHRLIEAMKHMFAARMDLGDPEFVNVTNSMNQMLSKAHAEEIQKRIFDNTTFPPEYYMNRWSQLRDQGTSHFCVVDADRNSVSMTSTVNYRFGAGVLSPSTGIVLNNEMDDFSTPTEITPDMLPPAPTNFIEPNKRPLSSMTPLVITKDGEFVAALGGAGGMHIIPAVLQVFLNCFVLNMKPKEAVESARIYHRLIPNVVSYENFTTINGDHIGVSEDTKMFLAERGHELKELSGGAIVQLIVQSFKEEKEEEMIIEIGRKIGKKSKPLKGLLTAVSDPRKDGKPAAV

SEQ ID NO: 34162 - DNA, 1612 bp, Arabidopsis thaliana
  misc_feature (1)..(1612): Ceres Seq. ID no. 13605292
atgaatcggcgctacgaaaagccaccgccattgtcagtttcctccaaagggaagaagaagcattttgtcaatcacacagctcccaacactcctggaaattacgagaggactcaaaccagtccaacgttatcaacggctcgatcacacgaacccgatgataagctcaattacgagatcttctcaattctcgaaagcaaatttctctttggttacgaagacccaaggctactatggattcctcagagtccattacgacccggtgattccgaagcaggtccttctcccagatcaccgttgactccaaacggcgtcgttctcccgggaacaccgtcttcatctttcagaagtccgagaggaagaatctgcgttttgagcattgacggtggcggtatgagaggtcttttggcgggaaaatccctaatctatttagagcaaatgctgaaagagaaatccggcgatccaaacgctcgaatcgccgattacttcgacgtcgctgccggatcaggtgtcggtggagtattcgctgcgatgatatttgcgacaagagacggcaaccgcccgattttcaaggcggaggacacttggaaatttctcgtagagaacgcagaaggattctacagatcagggagcggaagtggaggaggaggagcaggagcggcgattaaacgggtcataagatctggatccggatccggatcatcttcagtaaccgccgcaacggcgaagctagaaaaagcaatgaaagcatcattcgccgatctaacgcttaaagacacactcaaaccaattctcatctcttgctacgatctctcaagcacggctccgtttctattctcacgcgccgacgcgttagaaagcgacagtttcgattttcgtctccgagatatttgccgtgccacatgggcggagccggggacgtttgatccggttcgcacgtgttccgtcgacgggaaaacgcggtgcgttgcggtggggggtggattagcgatgagtaatccgacggcggcggcgataacgcacgtgtttcataacaaacaggagttcccggcggtgaaaggagtggaggatttgttggtgttgtcgcttgggactggtcagctttttgaagtgaattatgattatgaacaggttaagaattggcgcgttaaggaatgggctcggcccatggcgagaatctctggtgatgggtctgctgagtttgttgatcaagctgttgctatgggctttgggccttaccgaagtagtaattacgttcgcattcagcaggcaaatggatcgcgattaggagcttgtggaccgaacgtggacacggatccaagagcagagaatgtgaagaaactgacggagatagctgatgagatgttgaagcaaaacaatgtggagtcggttttgttcggaagcaaaaggataggagaaatgagcaattcagagaaaatagagtggtttgcgagcgagcttgtcattgagcagcagcgacgaagtgttagagcgtctccaaccgtaacgctaaagcaagctgtgtccaaaactaaccgcaatgctataaacgcaactctcactctcatatctaaagatagatgaaaacacctgtttttggtgcttcctattggtt

SEQ ID NO: 34163 - protein, 526 aa, Arabidopsis thaliana
  misc_feature (1)..(526): Ceres Seq. ID no. 13605293
MNRRYEKPPPLSVSSKGKKKHFVNHTAPNTPGNYERTQTSPTLSTARSHEPDDKLNYEIFSILESKFLFGYEDPRLLWIPQSPLRPGDSEAGPSPRSPLTPNGVVLPGTPSSSFRSPRGRICVLSIDGGGMRGLLAGKSLIYLEQMLKEKSGDPNARIADYFDVAAGSGVGGVFAAMIFATRDGNRPIFKAEDTWKFLVENAEGFYRSGSGSGGGGAGAAIKRVIRSGSGSGSSSVTAATAKLEKAMKASFADLTLKDTLKPILISCYDLSSTAPFLFSRADALESDSFDFRLRDICRATWAEPGTFDPVRTCSVDGKTRCVAVGGGLAMSNPTAAAITHVFHNKQEFPAVKGVEDLLVLSLGTGQLFEVNYDYEQVKNWRVKEWARPMARISGDGSAEFVDQAVAMGFGPYRSSNYVRIQQANGSRLGACGPNVDTDPRAENVKKLTEIADEMLKQNNVESVLFGSKRIGEMSNSEKIEWFASELVIEQQRRSVRASPTVTLKQAVSKTNRNAINATLTLISKDR

SEQ ID NO: 34164 - protein, 396 aa, Arabidopsis thaliana
  misc_feature (1)..(396): Ceres Seq. ID no. 13605294
MRGLLAGKSLIYLEQMLKEKSGDPNARIADYFDVAAGSGVGGVFAAMIFATRDGNRPIFKAEDTWKFLVENAEGFYRSGSGSGGGGAGAAIKRVIRSGSGSGSSSVTAATAKLEKAMKASFADLTLKDTLKPILISCYDLSSTAPFLFSRADALESDSFDFRLRDICRATWAEPGTFDPVRTCSVDGKTRCVAVGGGLAMSNPTAAAITHVFHNKQEFPAVKGVEDLLVLSLGTGQLFEVNYDYEQVKNWRVKEWARPMARISGDGSAEFVDQAVAMGFGPYRSSNYVRIQQANGSRLGACGPNVDTDPRAENVKKLTEIADEMLKQNNVESVLFGSKRIGEMSNSEKIEWFASELVIEQQRRSVRASPTVTLKQAVSKTNRNAINATLTLISKDR

SEQ ID NO: 34165 - protein, 381 aa, Arabidopsis thaliana
  misc_feature (1)..(381): Ceres Seq. ID no. 13605295
MLKEKSGDPNARIADYFDVAAGSGVGGVFAAMIFATRDGNRPIFKAEDTWKFLVENAEGFYRSGSGSGGGGAGAAIKRVIRSGSGSGSSSVTAATAKLEKAMKASFADLTLKDTLKPILISCYDLSSTAPFLFSRADALESDSFDFRLRDICRATWAEPGTFDPVRTCSVDGKTRCVAVGGGLAMSNPTAAAITHVFHNKQEFPAVKGVEDLLVLSLGTGQLFEVNYDYEQVKNWRVKEWARPMARISGDGSAEFVDQAVAMGFGPYRSSNYVRIQQANGSRLGACGPNVDTDPRAENVKKLTEIADEMLKQNNVESVLFGSKRIGEMSNSEKIEWFASELVIEQQRRSVRASPTVTLKQAVSKTNRNAINATLTLISKDR

SEQ ID NO: 34166 - DNA, 1447 bp, Arabidopsis thaliana
  misc_feature (1)..(1447): Ceres Seq. ID no. 13605312
ccacgcgtccgaagcaagatggagtcaagtgatcgttcaagtcaagcaaaagctttcgacgagacaaaaaccggcgtgaaagggcttgtggcttcgggaatcaaagagattccagccatgttccatacacctccggatactctaacaagcctgaaacaaacagcaccaccttcgcagcagctgacgatccccacggtggatctgaaaggaggaagcatggatttgatatcgcggcggagcgtggtggagaagattggagacgctgcggagagatggggattcttccaggtggtgaatcatgggatctcggtggaggtgatggagaggatgaaagaagggattcgcaggtttcacgagcaggacccggaagtgaagaaacggttctactctagggatcacactagagatgtgctttactacagcaacatcgatctccacacttgtaataaggctgcaaattggagagatacgctcgcctgttacatggcccccgatcctcccaagttacaggacttgcccgcggtttgcggggagattatgatggagtactcaaagcaactaatgactttaggtgaatttctctttgagcttctatctgaggctttgggattaaaccctaatcacctcaaggacatgggctgtgccaagtctcatatcatgtttggccaatactatccaccttgccctcagcctgaccttactttaggcataagcaagcacaccgatttctcgtttatcaccattcttcttcaggacaatatcggagggcttcaagttatccatgaccaatgctgggttgatgtttctcctgtccctggcgcccttgtcattaacatcggagatcttctccagcttataagcaatgacaaattcattagcgcggagcatagggtgatagcaaatggatcttctgaaccgcggatttcaatgccatgtttcgtcagcacgttcatgaagccgaatccacgaatatatggacccatcaaagaacttttgtcagaacaaaaccctgccaagtatagagacttaaccatcaccgagttttcaaacaccttcaggtcccaaacgatcagtcaccctgcgttacaccatttcaggatctgaagcaattatattggtggctctgctcggtcttcatctcaaagtaactttcgtgaaaccagcttcttttttctttctcaaaaggcataaggatatttgtaacattcaaataaggtacacaatgaaaactactactacttacttacttcatcttccagccgtgatgtaataaaatttgcgaggaactttcttgttttaagtcctcgtgttaccattttcatctacgaactttggggattagattccccctcttttgaaccttgttttatgttgtatcacgaaaaaagcttattggcctcatttatcatcatcatccaccgatgatatatcgtttaattatatgttc

SEQ ID NO: 34167 - protein, 367 aa, Arabidopsis thaliana
  misc_feature (1)..(367): Ceres Seq. ID no. 13605313
PRVRSKMESSDRSSQAKAFDETKTGVKGLVASGIKEIPAMFHTPPDTLTSLKQTAPPSQQLTIPTVDLKGGSMDLISRRSVVEKIGDAAERWGFFQVVNHGISVEVMERMKEGIRRFHEQDPEVKKRFYSRDHTRDVLYYSNIDLHTCNKAANWRDTLACYMAPDPPKLQDLPAVCGEIMMEYSKQLMTLGEFLFELLSEALGLNPNHLKDMGCAKSHIMFGQYYPPCPQPDLTLGISKHTDFSFITILLQDNIGGLQVIHDQCWVDVSPVPGALVINIGDLLQLISNDKFISAEHRVIANGSSEPRISMPCFVSTFMKPNPRIYGPIKELLSEQNPAKYRDLTITEFSNTFRSQTISHPALHHFRI

SEQ ID NO: 34168 - protein, 361 aa, Arabidopsis thaliana
  misc_feature (1)..(361): Ceres Seq. ID no. 13605314
MESSDRSSQAKAFDETKTGVKGLVASGIKEIPAMFHTPPDTLTSLKQTAPPSQQLTIPTVDLKGGSMDLISRRSVVEKIGDAAERWGFFQVVNHGISVEVMERMKEGIRRFHEQDPEVKKRFYSRDHTRDVLYYSNIDLHTCNKAANWRDTLACYMAPDPPKLQDLPAVCGEIMMEYSKQLMTLGEFLFELLSEALGLNPNHLKDMGCAKSHIMFGQYYPPCPQPDLTLGISKHTDFSFITILLQDNIGGLQVIHDQCWVDVSPVPGALVINIGDLLQLISNDKFISAEHRVIANGSSEPRISMPCFVSTFMKPNPRIYGPIKELLSEQNPAKYRDLTITEFSNTFRSQTISHPALHHFRI

SEQ ID NO: 34169 - protein, 328 aa, Arabidopsis thaliana
  misc_feature (1)..(328): Ceres Seq. ID no. 13605315
MFHTPPDTLTSLKQTAPPSQQLTIPTVDLKGGSMDLISRRSVVEKIGDAAERWGFFQVVNHGISVEVMERMKEGIRRFHEQDPEVKKRFYSRDHTRDVLYYSNIDLHTCNKAANWRDTLACYMAPDPPKLQDLPAVCGEIMMEYSKQLMTLGEFLFELLSEALGLNPNHLKDMGCAKSHIMFGQYYPPCPQPDLTLGISKHTDFSFITILLQDNIGGLQVIHDQCWVDVSPVPGALVINIGDLLQLISNDKFISAEHRVIANGSSEPRISMPCFVSTFMKPNPRIYGPIKELLSEQNPAKYRDLTITEFSNTFRSQTISHPALHHFRI

SEQ ID NO: 34170 - DNA, 793 bp, Arabidopsis thaliana
  misc_feature (1)..(793): Ceres Seq. ID no. 13605316
atcaaaatcaaatcacaatttccttggctcactcgctctcaccggctgcgaaaccaacgagagattccacaaaatcgaatcttttgtacaatggacaaaggagttgtggtagagctgattagagggtcgaccagttgggccaaagttgtggaagatatcgtgaagctggagaagaaaacgttccctaaacacgaatctctcgctcaaactttcgatgcagagctgcgtaagaaaaacgccggtttgctatacgtggatgctgaaggagacacagtaggctatgccatgtattcttggccatcttcgctttccgcttcaatcaccaagctcgcagtgaaggagaattgcagaagacaaggtcatggagaagcattgttgagagcggctatcgacaagtgcagaagcagaaaggtgcaacgggtttcacttcatgtcgaccccacgagaacttctgcggtgaatctgtacaaaaagcttgggttccaagtagactgtctagtgaaaagctactactcggctgatagagatgcttacagaatgtacctagattttgatgactctatttagcccaaaaggattgaatcattggatttggggttatatatgtattcccatatcttggcttgggcttgatatgccttgtacacattcattgattacttctctacatcaacatattacatatgtctagcgagtttttgatattttacgatgcaagatgaaatcatcttgggaccatcaacttatcaacttcttcacaatatagaatgagatttttaatcgttttcatgtt

SEQ ID NO: 34171 - protein, 188 aa, Arabidopsis thaliana
  misc_feature (1)..(188): Ceres Seq. ID no. 13605317
IKIKSQFPWLTRSHRLRNQREIPQNRIFCTMDKGVVVELIRGSTSWAKVVEDIVKLEKKTFPKHESLAQTFDAELRKKNAGLLYVDAEGDTVGYAMYSWPSSLSASITKLAVKENCRRQGHGEALLRAAIDKCRSRKVQRVSLHVDPTRTSAVNLYKKLGFQVDCLVKSYYSADRDAYRMYLDFDDSI

SEQ ID NO: 34172 - protein, 158 aa, Arabidopsis thaliana
  misc_feature (1)..(158): Ceres Seq. ID no. 13605318
MDKGVVVELIRGSTSWAKVVEDIVKLEKKTFPKHESLAQTFDAELRKKNAGLLYVDAEGDTVGYAMYSWPSSLSASITKLAVKENCRRQGHGEALLRAAIDKCRSRKVQRVSLHVDPTRTSAVNLYKKLGFQVDCLVKSYYSADRDAYRMYLDFDDSI

SEQ ID NO: 34173 - DNA, 1975 bp, Arabidopsis thaliana
  misc_feature (1)..(1975): Ceres Seq. ID no. 13605336
aaaagagataaacaaaacacaaaaatggtggtgaaaaactcgatcaaattcaactctcagagtgagcgcaagtctttggaagagaccaaggttcctcctatctttggccttcctccagatgccttagacgacaagaaacctacctcggattttgcagtacctatcatcgactttgcaggcgtccacaagtcgcgtgaagccgttgtggagaagatcaaagccgctgcagagaattggggaattttccaggtgatcaaccatggtgttcctttaagtgttcttgaagagattcaaaatggagttgttaggtttcatgaggaagatccggaggttaagaaatcttacttctcgcttgacctcaccaaaacatttatctaccacaataatttcgaactttacagttcgtctgctggtaactggagagactctttcgtttgttacatggatcccgatccttcaaaccctgaagatctcccagtggcttgcagagatgctatgatcggatactcgaagcatgtgatgagtttaggtggcttgctctttgaacttctctcagaagctcttggtttgaactctgatactcttaagagtatgggttgcatgaagggtttgcatatgatctgccattattaccctccctgtccacaacctgaccaaaccttaggcacaagtaagcattccgacaacacttttatcactattcttcttcaggacaacatcggtggtcttcaaattcttcatcaagactgttgggttgatgtctcgcctcttcccggggcacttatcatcaacatcggagatttcttgcagctaatgacgaacgacaagttcataagcgttgatcatagggtgcttacaaacagagttggaccgaggatttcaatcgcatgctttttcagctcgagtatgaatccaaattccacagtttacggaccaatcaaagagcttctctctgaagaaaaccctccaaaatacagagacttcactataccagagtactcaaagggatacattgagaaaggtctcgatggaacatcgcatctgtcacattacaggatttgagatctttaaaaaaacaaaatatatcctgtttgaagcaagatattcagatatgtctatgttccgtcctttccttatccatgtaaaagctagtactctgttcttgaggctgcaactgcaataacaaaagcattgtaccaaagatgagaaacaaatggtgtgtgtgtgtgtatttgttgaaaaaaaaaaaaaaacaaaactgtgagagaaaaagaaagagagaaagagatgggagagattgggtttacagagaagcaagaagctttggtgaaggaatcgtgggagatactgaaacaagacatccccaaatacagccttcacttcttctcacagatactggagatagcaccagcagcaaaaggcttgttctctttcctaagagactcagatgaagtccctcacaacaatcctaaactcaaagctcatgctgttaaagtcttcaagatgacatgtgaaacagctatacagctgagggaggaaggaaaggtggtagtggctgacacaaccctccaatatttaggctcaattcatctcaaaagcggcgttattgaccctcacttcgaggtggtgaaagaagctttgctaaggacattgaaagaggggttgggggagaaatacaatgaagaagtggaaggtgcttggtctcaagcttatgatcacttggctttagccatcaagaccgagatgaaacaagaagagtcataaaaccctattgatcatttgggtatcgcatacatgaatctattccacatacatgatacacacatacgtgtttctgtgtgtgtactatgttgctctctgactttctacagttcactattttaattataaagaaggatcttgtgctatcattagggagatacgtgatactgtagttcttcttgaaattgttattcgtgagaaatatcatggtttg

SEQ ID NO: 34174 - protein, 353 aa, Arabidopsis thaliana
  misc_feature (1)..(353): Ceres Seq. ID no. 13605337
KRDKQNTKMVVKNSIKFNSQSERKSLEETKVPPIFGLPPDALDDKKPTSDFAVPIIDFAGVHKSREAVVEKIKAAAENWGIFQVINHGVPLSVLEEIQNGVVRFHEEDPEVKKSYFSLDLTKTFIYHNNFELYSSSAGNWRDSFVCYMDPDPSNPEDLPVACRDAMIGYSKHVMSLGGLLFELLSEALGLNSDTLKSMGCMKGLHMICHYYPPCPQPDQTLGTSKHSDNTFITILLQDNIGGLQILHQDCWVDVSPLPGALIINIGDFLQLMTNDKFISVDHRVLTNRVGPRISIACFFSSSMNPNSTVYGPIKELLSEENPPKYRDFTIPEYSKGYIEKGLDGTSHLSHYRI

SEQ ID NO: 34175 - protein, 345 aa, Arabidopsis thaliana
  misc_feature (1)..(345): Ceres Seq. ID no. 13605338
MVVKNSIKFNSQSERKSLEETKVPPIFGLPPDALDDKKPTSDFAVPIIDFAGVHKSREAVVEKIKAAAENWGIFQVINHGVPLSVLEEIQNGVVRFHEEDPEVKKSYFSLDLTKTFIYHNNFELYSSSAGNWRDSFVCYMDPDPSNPEDLPVACRDAMIGYSKHVMSLGGLLFELLSEALGLNSDTLKSMGCMKGLHMICHYYPPCPQPDQTLGTSKHSDNTFITILLQDNIGGLQILHQDCWVDVSPLPGALIINIGDFLQLMTNDKFISVDHRVLTNRVGPRISIACFFSSSMNPNSTVYGPIKELLSEENPPKYRDFTIPEYSKGYIEKGLDGTSHLSHYRI

SEQ ID NO: 34176 - protein, 206 aa, Arabidopsis thaliana
  misc_feature (1)..(206): Ceres Seq. ID no. 13605339
MDPDPSNPEDLPVACRDAMIGYSKHVMSLGGLLFELLSEALGLNSDTLKSMGCMKGLHMICHYYPPCPQPDQTLGTSKHSDNTFITILLQDNIGGLQILHQDCWVDVSPLPGALIINIGDFLQLMTNDKFISVDHRVLTNRVGPRISIACFFSSSMNPNSTVYGPIKELLSEENPPKYRDFTIPEYSKGYIEKGLDGTSHLSHYRI

SEQ ID NO: 34177 - DNA, 1512 bp, Arabidopsis thaliana
  misc_feature (1)..(1512): Ceres Seq. ID no. 13605356
aaaattttacacttatgctcttcatatcacatacaacaaactcatatatataaaaactttaaccttcgtatagcaacgatctagtagaaagcttatactaaaactttctgattctcttaatatggcggaggagtttaaagctacggcatcgatttgtggtggcggaggtggcgcgtggtggaactcgccaaggagcgttatgtctccttcggatcatttcttgtcaccatgcttcggagcggctatcacttccaatgattttagctcgcaagagaatcatctcaaatctaggatgacttgtacggacaacaacaacatcgttttcgggcagcgagaggcggattctgacagtggaggaagtaccgtgacgatggactcgacgttgcagatgatgggtctagggttttcctcaaattgttcttcagattggaaccaaaccattttacaagaagacttaaactcaagcttcataaggagctcacaagatcaagatcatggccaaggattcttatccacaactacttcaccttatatacttaatccagcttgttcttcatctccatcaacttcttcgtcctcaagcttgatacgaaccttttacgatcccgaaccaagtccatacaactttgtctccaccacaagtggttcaatcaacgatcctcaactttcttgggctaataagacaaatcctcatcatcaagtagcttatggactaattaacagcttctctaacaacgcaaactctcgacccttttggaattcttcatcaaccactaacttaaacaacacgacgccgagcaattttgtaaccactccgcagataatatctactcgtttggaggacaaaaccaagaatctgaagacaagagctcagagtgagtctttgaagagagcaaaggataatgaatctgcggcgaagaaaccgagagtcaccacgccttcaccgttgccaactttcaaggtgagaaaagagaatctaagggaccagataacttcattacaacaactagtttcacctttcggaaagacagatactgcatctgttctccaagaagctatagagtacatcaagttccttcacgaccaagtcactgttctaagcactccatacatgaaacaaggtgcctcgaaccaacaacaacagcagatatctggtaaatcgaagagtcaagatgaaaatgagaatcacgaactaagaggacatggtctatgtctcgtcccaatatcaagcacgtttccggtggctaacgaaacaacagccgatttttggacaccaacgtttgggggcaacaatttcaggtgattaaagagagagggttgtggttgtcaagacggatgggaacatatgctaaattcagcttggagactctaaagcataacaataatttttaatgtattttcttcttctttcaatattttaaggggggtttattgctgaatttagcatatatgggttgtttttatgttgaataaccttttgttcctgtcattgttcttgaatatatatatata

SEQ ID NO: 34178 - protein, 393 aa, Arabidopsis thaliana
  misc_feature (1)..(393): Ceres Seq. ID no. 13605357
MAEEFKATASICGGGGGAWWNSPRSVMSPSDHFLSPCFGAAITSNDFSSQENHLKSRMTCTDNNNIVFGQREADSDSGGSTVTMDSTLQMMGLGFSSNCSSDWNQTILQEDLNSSFIRSSQDQDHGQGFLSTTTSPYILNPACSSSPSTSSSSSLIRTFYDPEPSPYNFVSTTSGSINDPQLSWANKTNPHHQVAYGLINSFSNNANSRPFWNSSSTTNLNNTTPSNFVTTPQIISTRLEDKTKNLKTRAQSESLKRAKDNESAAKKPRVTTPSPLPTFKVRKENLRDQITSLQQLVSPFGKTDTASVLQEAIEYIKFLHDQVTVLSTPYMKQGASNQQQQQISGKSKSQDENENHELRGHGLCLVPISSTFPVANETTADFWTPTFGGNNFR

SEQ ID NO: 34179 - protein, 367 aa, Arabidopsis thaliana
  misc_feature (1)..(367): Ceres Seq. ID no. 13605358
MSPSDHFLSPCFGAAITSNDFSSQENHLKSRMTCTDNNNIVFGQREADSDSGGSTVTMDSTLQMMGLGFSSNCSSDWNQTILQEDLNSSFIRSSQDQDHGQGFLSTTTSPYILNPACSSSPSTSSSSSLIRTFYDPEPSPYNFVSTTSGSINDPQLSWANKTNPHHQVAYGLINSFSNNANSRPFWNSSSTTNLNNTTPSNFVTTPQIISTRLEDKTKNLKTRAQSESLKRAKDNESAAKKPRVTTPSPLPTFKVRKENLRDQITSLQQLVSPFGKTDTASVLQEAIEYIKFLHDQVTVLSTPYMKQGASNQQQQQISGKSKSQDENENHELRGHGLCLVPISSTFPVANETTADFWTPTFGGNNFR

SEQ ID NO: 34180 - protein, 336 aa, Arabidopsis thaliana
  misc_feature (1)..(336): Ceres Seq. ID no. 13605359
MTCTDNNNIVFGQREADSDSGGSTVTMDSTLQMMGLGFSSNCSSDWNQTILQEDLNSSFIRSSQDQDHGQGFLSTTTSPYILNPACSSSPSTSSSSSLIRTFYDPEPSPYNFVSTTSGSINDPQLSWANKTNPHHQVAYGLINSFSNNANSRPFWNSSSTTNLNNTTPSNFVTTPQIISTRLEDKTKNLKTRAQSESLKRAKDNESAAKKPRVTTPSPLPTFKVRKENLRDQITSLQQLVSPFGKTDTASVLQEAIEYIKFLHDQVTVLSTPYMKQGASNQQQQQISGKSKSQDENENHELRGHGLCLVPISSTFPVANETTADFWTPTFGGNNFR

SEQ ID NO: 34181 - DNA, 1583 bp, Arabidopsis thaliana
  misc_feature (1)..(1583): Ceres Seq. ID no. 13605360
gacgacatacacgagaaagaaaaaaaaccaaaatgaaaacttttgccaactttgcaattctgtttttattacaaagcttattgtttcctctttacagttcatgccttcatcaaacttcagatgattcatctccatttccttctgatttcctctttggcacagcttcttctgctttccagtatgaaggtgccttcttaaccgatggaaaaggtctgaacaattgggatgtctttgcccatgaaaaccctgggaaaatagttgatggaagcaatggagacatagctacggaccaatatcatcgatatatggaagatatccaatcaatgaattttcttggagtcaatagttacagattatctatttcctggtctagagtcttacctaatggaagatttggagttattaattataagggaataaagtattacaacaatttgatcgacgctcttattaaaaaagggattacaccatttgtgacgttgaaccacttcgactatcctcaagaactcgagaaccggttcaagagttggttaagctccgagatgcagaaagatttcgggtacttagctgatatatgtttcaaacattttggagaccgagttaaacactggatcacgattaacgaaccaaaccaacatataagcttagcatatcgaagtggtttgtttccaccagcgcggtgctccatgccatacggaaattgtactcacgggaactcagaaactgagccttttatagccgctcataatatgatcctcgcacatgcaaaggcgattcaaatataccgaaccaaatatcaaagagaacaaaagggaatcattggcattgtggtacaaacatcatggtttgaacccataagcgattcgattgctgataaaaatgctgccgagagagctcaatcattttattcaaattggattctagatcccgttgtgtatgggaaatatccggaagaaatggtgaatctacttggatcagctttgccaaaattttcgagcaatgaaatgaacagcctaatgagctataaatcagactttttgggtattaatcactatacaagttacttcatacaagattgtttgatcactgcttgtaattctggagacggagcttctaaaagcgaaggattagccctcaaattggaccggaaaggaaatgtttccatcggagaactgaccgacgtaaattggcagcatattgatcctaacggattcagaaagatgttgaattacctaaaaaataggtaccacaacataccaatgtacatcaccgaaaatggtttcggacagttgcaaaaaccagagacaacagttgaagaacttctgcatgatacaaaaaggatacaatacttgagtggatatttggatgctttgaaagcagcaatgagggatggagcaaatgtgaagggatatttcgcatggtcactattagataattttgaatggttgtacggatacaaggttcgatttgggctattccacgttgattttacaactttgaaaaggacaccaaagcaatcagctacatggtacaagaacttcattgaacagaacgtgaatatagaagatcaaatagataaataa

SEQ ID NO: 34182 - protein, 526 aa, Arabidopsis thaliana
  misc_feature (1)..(526): Ceres Seq. ID no. 13605361
RHTRERKKTKMKTFANFAILFLLQSLLFPLYSSCLHQTSDDSSPFPSDFLFGTASSAFQYEGAFLTDGKGLNNWDVFAHENPGKIVDGSNGDIATDQYHRYMEDIQSMNFLGVNSYRLSISWSRVLPNGRFGVINYKGIKYYNNLIDALIKKGITPFVTLNHFDYPQELENRFKSWLSSEMQKDFGYLADICFKHFGDRVKHWITINEPNQHISLAYRSGLFPPARCSMPYGNCTHGNSETEPFIAAHNMILAHAKAIQIYRTKYQREQKGIIGIVVQTSWFEPISDSIADKNAAERAQSFYSNWILDPVVYGKYPEEMVNLLGSALPKFSSNEMNSLMSYKSDFLGINHYTSYFIQDCLITACNSGDGASKSEGLALKLDRKGNVSIGELTDVNWQHIDPNGFRKMLNYLKNRYHNIPMYITENGFGQLQKPETTVEELLHDTKRIQYLSGYLDALKAAMRDGANVKGYFAWSLLDNFEWLYGYKVRFGLFHVDFTTLKRTPKQSATWYKNFIEQNVNIEDQIDK

SEQ ID NO: 34183 - protein, 516 aa, Arabidopsis thaliana
  misc_feature (1)..(516): Ceres Seq. ID no. 13605362
MKTFANFAILFLLQSLLFPLYSSCLHQTSDDSSPFPSDFLFGTASSAFQYEGAFLTDGKGLNNWDVFAHENPGKIVDGSNGDIATDQYHRYMEDIQSMNFLGVNSYRLSISWSRVLPNGRFGVINYKGIKYYNNLIDALIKKGITPFVTLNHFDYPQELENRFKSWLSSEMQKDFGYLADICFKHFGDRVKHWITINEPNQHISLAYRSGLFPPARCSMPYGNCTHGNSETEPFIAAHNMILAHAKAIQIYRTKYQREQKGIIGIVVQTSWFEPISDSIADKNAAERAQSFYSNWILDPVVYGKYPEEMVNLLGSALPKFSSNEMNSLMSYKSDFLGINHYTSYFIQDCLITACNSGDGASKSEGLALKLDRKGNVSIGELTDVNWQHIDPNGFRKMLNYLKNRYHNIPMYITENGFGQLQKPETTVEELLHDTKRIQYLSGYLDALKAAMRDGANVKGYFAWSLLDNFEWLYGYKVRFGLFHVDFTTLKRTPKQSATWYKNFIEQNVNIEDQIDK

SEQ ID NO: 34184 - protein, 425 aa, Arabidopsis thaliana
  misc_feature (1)..(425): Ceres Seq. ID no. 13605363
MEDIQSMNFLGVNSYRLSISWSRVLPNGRFGVINYKGIKYYNNLIDALIKKGITPFVTLNHFDYPQELENRFKSWLSSEMQKDFGYLADICFKHFGDRVKHWITINEPNQHISLAYRSGLFPPARCSMPYGNCTHGNSETEPFIAAHNMILAHAKAIQIYRTKYQREQKGIIGIVVQTSWFEPISDSIADKNAAERAQSFYSNWILDPVVYGKYPEEMVNLLGSALPKFSSNEMNSLMSYKSDFLGINHYTSYFIQDCLITACNSGDGASKSEGLALKLDRKGNVSIGELTDVNWQHIDPNGFRKMLNYLKNRYHNIPMYITENGFGQLQKPETTVEELLHDTKRIQYLSGYLDALKAAMRDGANVKGYFAWSLLDNFEWLYGYKVRFGLFHVDFTTLKRTPKQSATWYKNFIEQNVNIEDQIDK

SEQ ID NO: 34185 - DNA, 1759 bp, Arabidopsis thaliana
  misc_feature (1)..(1759): Ceres Seq. ID no. 13605392
ctggtgcttaaacactctggtcaaaatgggagtatactcgagagcggttgcgttttcggtctttgtgtcgtttctgctgtttttcactgcttattctaagagaaatgatggaacattcagagttggcctgaaaaaactgaagttggatcctaacaaccgactcgcaacacgctttggttccaagcaagaagaggccttgagatcttctttgcgttcgtacaacaacaatcttggtggtgattctggagatgctgatattgtcccgctcaagaattacttggatgctcagtactatggtgagattgctattggtactccaccgcagaagttcactgtcatttttgataccggaagctctaacctttgggtgccatcaggaaaatgttttttctcgctgtcttgttactttcatgctaagtacaagtcctcgcgatcaagcacatataagaagagtggaaaacgtgccgcaatccattacggctcaggatcaatctctggtttctttagttatgatgctgtcacggttggtgatttggttgtcaaagatcaggagtttattgagacaaccagtgagcctggtttaacattcctggtggctaagtttgatggtcttcttggtcttgggttccaagagatcgctgttggaaacgctactcctgtttggtacaatatgctcaagcaaggccttataaagaggccggtcttttcattttggcttaaccgtgatccaaagagtgaagaaggcggtgaaatcgtattcggaggtgttgatccaaagcattttagaggagaacatacatttgttcctgtgacacaaaggggttactggcagttcgacatgggtgaggttctcattgccggtgaatctactggatattgtggaagtggttgttctgcgatagcagattctggaacatcgttacttgcgggtccaacggctgtggttgccatgataaataaggctattggagcatctggagttgttagccagcagtgcaagactgttgttgaccagtatggacaaaccattttggatttacttttggctgagactcaaccaaagaagatttgctcacaaattggtctttgcgcttacgatggcacccatggggtcagtatggggattgaatcggtggtggacaaggaaaacacaagatcatctagtggtcttcgagacgcgggttgtcctgcatgtgaaatggcggttgtgtggatacagagccaattgaggcagaacatgactcaagagaggatagtgaactacattaatgagatatgcgagcgcatgcctagtccaaatggagagtctgctgttgactgctcacaactttctaaaatgcctactgtttcattcaccattggaggcaaagtctttgatcttgctcccgaagagtacgtactgaagattggggaaggaccagtggcacaatgtattagcggctttaccgcacttgatatccctccacctcgtggacctctctggatacttggagatgtgtttatgggaaaataccacactgtctttgacttcggaaacgagcaggttggcttcgcagaagccgtgtgaaaaatgtaacatcgatcttttgttgatatgtttttggtgtgagagctttgttgtgttgtgtttacatggagaggttttaagaatgaagcctcgttgttgttgttaacaatgttttgccataaacatacgttaaagctttggggatgttttctttctaactctcaccaataaataaaataaagacctcttttt

SEQ ID NO: 34186 - protein, 521 aa, Arabidopsis thaliana
  misc_feature (1)..(521): Ceres Seq. ID no. 13605393
WCLNTLVKMGVYSRAVAFSVFVSFLLFFTAYSKRNDGTFRVGLKKLKLDPNNRLATRFGSKQEEALRSSLRSYNNNLGGDSGDADIVPLKNYLDAQYYGEIAIGTPPQKFTVIFDTGSSNLWVPSGKCFFSLSCYFHAKYKSSRSSTYKKSGKRAAIHYGSGSISGFFSYDAVTVGDLVVKDQEFIETTSEPGLTFLVAKFDGLLGLGFQEIAVGNATPVWYNMLKQGLIKRPVFSFWLNRDPKSEEGGEIVFGGVDPKHFRGEHTFVPVTQRGYWQFDMGEVLIAGESTGYCGSGCSAIADSGTSLLAGPTAVVAMINKAIGASGVVSQQCKTVVDQYGQTILDLLLAETQPKKICSQIGLCAYDGTHGVSMGIESVVDKENTRSSSGLRDAGCPACEMAVVWIQSQLRQNMTQERIVNYINEICERMPSPNGESAVDCSQLSKMPTVSFTIGGKVFDLAPEEYVLKIGEGPVAQCISGFTALDIPPPRGPLWILGDVFMGKYHTVFDFGNEQVGFAEAV

SEQ ID NO: 34187 - protein, 513 aa, Arabidopsis thaliana
  misc_feature (1)..(513): Ceres Seq. ID no. 13605394
MGVYSRAVAFSVFVSFLLFFTAYSKRNDGTFRVGLKKLKLDPNNRLATRFGSKQEEALRSSLRSYNNNLGGDSGDADIVPLKNYLDAQYYGEIAIGTPPQKFTVIFDTGSSNLWVPSGKCFFSLSCYFHAKYKSSRSSTYKKSGKRAAIHYGSGSISGFFSYDAVTVGDLVVKDQEFIETTSEPGLTFLVAKFDGLLGLGFQEIAVGNATPVWYNMLKQGLIKRPVFSFWLNRDPKSEEGGEIVFGGVDPKHFRGEHTFVPVTQRGYWQFDMGEVLIAGESTGYCGSGCSAIADSGTSLLAGPTAVVAMINKAIGASGVVSQQCKTVVDQYGQTILDLLLAETQPKKICSQIGLCAYDGTHGVSMGIESVVDKENTRSSSGLRDAGCPACEMAVVWIQSQLRQNMTQERIVNYINEICERMPSPNGESAVDCSQLSKMPTVSFTIGGKVFDLAPEEYVLKIGEGPVAQCISGFTALDIPPPRGPLWILGDVFMGKYHTVFDFGNEQVGFAEAV

SEQ ID NO: 34188 - protein, 298 aa, Arabidopsis thaliana
  misc_feature (1)..(298): Ceres Seq. ID no. 13605395
MLKQGLIKRPVFSFWLNRDPKSEEGGEIVFGGVDPKHFRGEHTFVPVTQRGYWQFDMGEVLIAGESTGYCGSGCSAIADSGTSLLAGPTAVVAMINKAIGASGVVSQQCKTVVDQYGQTILDLLLAETQPKKICSQIGLCAYDGTHGVSMGIESVVDKENTRSSSGLRDAGCPACEMAVVWIQSQLRQNMTQERIVNYINEICERMPSPNGESAVDCSQLSKMPTVSFTIGGKVFDLAPEEYVLKIGEGPVAQCISGFTALDIPPPRGPLWILGDVFMGKYHTVFDFGNEQVGFAEAV

SEQ ID NO: 34189 - DNA, 1774 bp, Arabidopsis thaliana
  misc_feature (1)..(1774): Ceres Seq. ID no. 13605426
tattcggttctcgagtcatcgctgtctggaacagcgatgactcgagaaaagaataatggcgaattctcaaagatcatcatctctgatcgatccaaggaacggtttctgcacatcaaactccacattttacagtaaacgcaaaccattggcacttccttcaaaagaatcactcgacatcacaacattcatctcctcccaaacgtaccgtggcaaaaccgccttcatagacgcagccacggaccaccgcataagcttctccgatttatggatggccgtggatcgtgtcgccgactgtctcctccacgacgtgggaatacggagaggtgacgtggtcctagtcctctctcccaacaccatctccatccccattgtctgcctctccgtgatgtctcttggcgctgtcttaactaccgctaatcctctcaacaccgctagtgaaatcttaagacaaatcgcggatagcaatccaaaactcgccttcacaacaccggaactggctcccaaaatcgccagttccggtatctctatcgtcctcgagcgcgtagaagacactctacgcgttccgagaggactcaaagtggttgggaatctaactgaaatgatgaagaaagaaccaagtggacaagcagtcagaaaccaagttcataaagacgacacggcgatgttgctttactcctcggggacgacgggacgaagcaaaggagtgaattcgtctcacgggaacttaatagcacacgtggcgagatacatcgcggagccattcgagcagccacaacagaccttcatttgcactgttccgttgttccacacttttggtttactaaacttcgttttggccaccttagcgttaggtacgaccgttgtcatcctcccgaggtttgacctcggagagatgatggcggctgtcgagaaatacagagcgacgactctgattctcgtgccgccagttttagtaactatgataaacaaagcggatcaaataatgaagaagtacgacgtgagcttcttgagaacggtgcggtgcggtggagcacctttgagcaaggaagttactcaagggtttatgaagaaatatccaacggttgatgtttatcaaggatacgcattgacggaatctaacggtgcaggagcttcgatagaatcagtggaggagagtcggaggtacggtgcggtggggttgttgtcatgtggtgtagaagcgaggattgtggatccgaatacgggtcaggtcatgggtttgaaccaaacgggcgaactttggcttaaagggccttctatcgccaaaggttatttcaggaatgaagaagaaattataacttcagaaggatggcttaaaacaggagatctatgctatatagacaacgatggatttctttttatcgttgatcgattgaaagagcttatcaaatacaaaggttaccaggtacctccagctgaactagaggctctcttactaaaccatccagatattctcgatgcagccgttattccgtttccagataaagaagcaggacaatttccgatggcttacgtagcacgaaagcctgagagtaatctttgtgagaaaaaggttatcgactttatttctaaacaggtggcaccatataagaaaataagaaaagtcgcatttatagactctataccaaagactccatcgggcaaaacacttcgcaaggatctaatcaaatttgccatttcaaaaatttaaaagaatcactattttgtcatttttatttgtatgaatttctgacataataaaagagaagttatatcc

SEQ ID NO: 34190 - protein, 550 aa, Arabidopsis thaliana; identical to SEQ ID NO: 29167
  misc_feature (1)..(550): Ceres Seq. ID no. 13605427

SEQ ID NO: 34191 - protein, 479 aa, Arabidopsis thaliana; identical to SEQ ID NO: 29168
  misc_feature (1)..(479): Ceres Seq. ID no. 13605428

SEQ ID NO: 34192 - protein, 440 aa, Arabidopsis thaliana; identical to SEQ ID NO: 29169
  misc_feature (1)..(440): Ceres Seq. ID no. 13605429

SEQ ID NO: 34193 - DNA, 2313 bp, Arabidopsis thaliana
  misc_feature (1)..(2313): Ceres Seq. ID no. 13605437
cttggaatcattggtcaaaagagagaggctacaactttaaaaggccttcaataacgttggaccggctctaagaggacaaagggtagtcttatatcttcagtcttctacaagccaatggttgaagggttctcattgtcattgatgttcctccttgtttcacatttctttgtctcaggagtaatgtcgagaaactttactatagagaacaaatgcgattacactgtctggccgggattcctaaccatgactactgcggtttcgctccccaccaacggcttctccctcaagaaaggggagtcacgtgtcatcaatgtgccaccgtcatggtcaggtcgtttgtggggtagatcgttctgctccaccagctcaacagggaatttctcatgtgccacgggagactgcggctccggaaaaatcgagtgctccgattccggagcaaggcctcctacgacgctaattgattttacccttgacgctaccgacggtcaagacttctacgatgtaagcgtcgtggatggttacaaccttccgttggttgtggtcccacaacgtctagggagtggccggacatgtagcaacgttggttgtgtggttaacttgaacaagacttgtccgtcggagcttaaagtgatgggaagctctaacaaggaacatcccattgcttgcatgaacgcttgtcagaaattcgggttgccggagttctgctgctacggtgagtacggtaaacctgcaaaatgtcaaccgacgctttactctacgaatttcaagaacgagtgtccactcgcttatagctatgcttatgacaatgaaaacaacaccttcagatgctcaaactcacctaactatgtcatcaccttttgccccaacgacataagttcaatgtctcaaccatccaaggaaactaatggaggaacgaaacaaaagtcatcatggaagttaaaactcatagttggagtctcagcagctttgaccctgatgatcttaattgtggtcgtaataatagtgagaacaaagaatatgagaaatagtgagtggaatgatcagaacgttgaagcagttgcaatgttgaaacgatacagttatacaagagtcaagaagatgacaaactcatttgcgcatgttctcggtaaaggaggatttggaactgtctacaaaggaaagttagccgatagcggtcgggatgtcgcagttaagatcttgaaggtgtcagagggtaatggagaagagttcattaatgaagtagcaagcatgagtagaacatctcatgtcaatattgtttctctgcttggattctgttatgaaaagaacaagagagctataatctacgagttcatgccgaatgggtccctcgacaagtatatttctgcgaatatgtcaacaaagatggaatgggaaagattatacgacgttgcggtaggtatctctcgcggcctagagtatttacacaatcggtgtgtcacgaggattgtccatttcgacataaagccgcagaacatactgatggacgaaaatctttgtcctaagatttcagattttggtcttgctaaactctgcaaaaataaggagagcatcatatcaatgctacacatgagagggacctttggatacattgcccctgaaatgttttccaagaattttggagcagtttcgcataagtcagatgtttatagttatgggatggtagttcttgagatgattggagcaaagaatatagaaaaggttgaatattctggatctaacaatggttcaatgtactttccagaatgggtctataaagattttgagaagggagaaatcacaaggatttttggagatagtataactgatgaagaagagaaaattgcaaagaaattggtattggttgctctatggtgtatacagatgaatccatcagaccgtccaccaatgatcaaagtcattgagatgttagaggggaatctagaggctcttcaagtaccacctaatcctctcttgttttcacccgaggaaacggttccagacactcttgaagatagtgatgacacttcaaccttctttaatccaagtcattttgaaagaggtactctcttagatagtgaagatgttttacaacatgggtcaaggtcctcctaaactaaagtcaacccgagagcggatctatttaaacttgtcaagatctttagctatttctcgattagtttttaataacttctgacttaatagtgtgtttctatgcttattagatgatgtttactgacgcaggcactcaatattgttggttaatgaagactattttctgttgtttttctcttggaaagagagaaacgttaatat

SEQ ID NO: 34194 - protein, 665 aa, Arabidopsis thaliana
  misc_feature (1)..(665): Ceres Seq. ID no. 13605438
MVEGFSLSLMFLLVSHFFVSGVMSRNFTIENKCDYTVWPGFLTMTTAVSLPTNGFSLKKGESRVINVPPSWSGRLWGRSFCSTSSTGNFSCATGDCGSGKIECSDSGARPPTTLIDFTLDATDGQDFYDVSVVDGYNLPLVVVPQRLGSGRTCSNVGCVVNLNKTCPSELKVMGSSNKEHPIACMNACQKFGLPEFCCYGEYGKPAKCQPTLYSTNFKNECPLAYSYAYDNENNTFRCSNSPNYVITFCPNDISSMSQPSKETNGGTKQKSSWKLKLIVGVSAALTLMILIVVVIIVRTKNMRNSEWNDQNVEAVAMLKRYSYTRVKKMTNSFAHVLGKGGFGTVYKGKLADSGRDVAVKILKVSEGNGEEFINEVASMSRTSHVNIVSLLGFCYEKNKRAIIYEFMPNGSLDKYISANMSTKMEWERLYDVAVGISRGLEYLHNRCVTRIVHFDIKPQNILMDENLCPKISDFGLAKLCKNKESIISMLHMRGTFGYIAPEMFSKNFGAVSHKSDVYSYGMVVLEMIGAKNIEKVEYSGSNNGSMYFPEWVYKDFEKGEITRIFGDSITDEEEKIAKKLVLVALWCIQMNPSDRPPMIKVIEMLEGNLEALQVPPNPLLFSPEETVPDTLEDSDDTSTFFNPSHFERGTLLDSEDVLQHGSRSS

SEQ ID NO: 34195 - protein, 656 aa, Arabidopsis thaliana
  misc_feature (1)..(656): Ceres Seq. ID no. 13605439
MFLLVSHFFVSGVMSRNFTIENKCDYTVWPGFLTMTTAVSLPTNGFSLKKGESRVINVPPSWSGRLWGRSFCSTSSTGNFSCATGDCGSGKIECSDSGARPPTTLIDFTLDATDGQDFYDVSVVDGYNLPLVVVPQRLGSGRTCSNVGCVVNLNKTCPSELKVMGSSNKEHPIACMNACQKFGLPEFCCYGEYGKPAKCQPTLYSTNFKNECPLAYSYAYDNENNTFRCSNSPNYVITFCPNDISSMSQPSKETNGGTKQKSSWKLKLIVGVSAALTLMILIVVVIIVRTKNMRNSEWNDQNVEAVAMLKRYSYTRVKKMTNSFAHVLGKGGFGTVYKGKLADSGRDVAVKILKVSEGNGEEFINEVASMSRTSHVNIVSLLGFCYEKNKRAIIYEFMPNGSLDKYISANMSTKMEWERLYDVAVGISRGLEYLHNRCVTRIVHFDIKPQNILMDENLCPKISDFGLAKLCKNKESIISMLHMRGTFGYIAPEMFSKNFGAVSHKSDVYSYGMVVLEMIGAKNIEKVEYSGSNNGSMYFPEWVYKDFEKGEITRIFGDSITDEEEKIAKKLVLVALWCIQMNPSDRPPMIKVIEMLEGNLEALQVPPNPLLFSPEETVPDTLEDSDDTSTFFNPSHFERGTLLDSEDVLQHGSRSS

SEQ ID NO: 34196 - protein, 643 aa, Arabidopsis thaliana
  misc_feature (1)..(643): Ceres Seq. ID no. 13605440
MSRNFTIENKCDYTVWPGFLTMTTAVSLPTNGFSLKKGESRVINVPPSWSGRLWGRSFCSTSSTGNFSCATGDCGSGKIECSDSGARPPTTLIDFTLDATDGQDFYDVSVVDGYNLPLVVVPQRLGSGRTCSNVGCVVNLNKTCPSELKVMGSSNKEHPIACMNACQKFGLPEFCCYGEYGKPAKCQPTLYSTNFKNECPLAYSYAYDNENNTFRCSNSPNYVITFCPNDISSMSQPSKETNGGTKQKSSWKLKLIVGVSAALTLMILIVVVIIVRTKNMRNSEWNDQNVEAVAMLKRYSYTRVKKMTNSFAHVLGKGGFGTVYKGKLADSGRDVAVKILKVSEGNGEEFINEVASMSRTSHVNIVSLLGFCYEKNKRAIIYEFMPNGSLDKYISANMSTKMEWERLYDVAVGISRGLEYLHNRCVTRIVHFDIKPQNILMDENLCPKISDFGLAKLCKNKESIISMLHMRGTFGYIAPEMFSKNFGAVSHKSDVYSYGMVVLEMIGAKNIEKVEYSGSNNGSMYFPEWVYKDFEKGEITRIFGDSITDEEEKIAKKLVLVALWCIQMNPSDRPPMIKVIEMLEGNLEALQVPPNPLLFSPEETVPDTLEDSDDTSTFFNPSHFERGTLLDSEDVLQHGSRSS

SEQ ID NO: 34197 - DNA, 932 bp, Arabidopsis thaliana
  misc_feature (1)..(932): Ceres Seq. ID no. 13605445
ggaagctaaaagtaaaacaaaatcatcaaagagggataataatcatgaaattgctagaaaaaatgacatatgtagaatgttttatgataataatggcgacatggttcatgttcataagttacagtcatggagccaatgtagctgcagcacctggaaccaacggacttgatactgcttggtatgatgcgcgagccgcatattatggtgatatccatggtggaggcactgaactagaaggagcttgtggatacggtgatctaaacaaacatggatatggtctagccacagcagcattgagcacggcgctcttcaacagcggggcctcatgtggggcttgttacgagatcatgtgctctcctaatccacaaggatgtttgtccggatctatcaagatcacagcaacagatttatgtccaccaggatccgcttggtgctacctaccaaataaacactttgatctctccttaccaatgttcatcaagatcgctcaggtcaaagccaagatggtcccggttagatacagacgtgttccctgtgcgaaaaccggtggtgtcaagtttgaagttaaaggaaaccctaatatcttaacgatcttgccgtacaatgtaggaggagcaggagatattatagccgtgtctgctaagggaagcaaaaccgcgtgggtagtaatgagcagatattggggacaaaattggactactaatgttaatctaaccggtcaaagtgtatcattaagggttacaacgagtgatgggattacaaaggattttactgatgtgatgccagcaagttggggatttgggcagacttttgatggaaagactaacttttaagaaaaatgatatgaattttttttagttttggcttacaagttacaactaagagagatgtattggttgcaataattaaaaataaatgaaatattgtttatg

SEQ ID NO: 34198 - protein, 276 aa, Arabidopsis thaliana
  misc_feature (1)..(276): Ceres Seq. ID no. 13605446
KLKVKQNHQRGIIIMKLLEKMTYVECFMIIMATWFMFISYSHGANVAAAPGTNGLDTAWYDARAAYYGDIHGGGTELEGACGYGDLNKHGYGLATAALSTALFNSGASCGACYEIMCSPNPQGCLSGSIKITATDLCPPGSAWCYLPNKHFDLSLPMFIKIAQVKAKMVPVRYRRVPCAKTGGVKFEVKGNPNILTILPYNVGGAGDIIAVSAKGSKTAWVVMSRYWGQNWTTNVNLTGQSVSLRVTTSDGITKDFTDVMPASWGFGQTFDGKTNF

SEQ ID NO: 34199 - protein, 262 aa, Arabidopsis thaliana
  misc_feature (1)..(262): Ceres Seq. ID no. 13605447
MKLLEKMTYVECFMIIMATWFMFISYSHGANVAAAPGTNGLDTAWYDARAAYYGDIHGGGTELEGACGYGDLNKHGYGLATAALSTALFNSGASCGACYEIMCSPNPQGCLSGSIKITATDLCPPGSAWCYLPNKHFDLSLPMFIKIAQVKAKMVPVRYRRVPCAKTGGVKFEVKGNPNILTILPYNVGGAGDIIAVSAKGSKTAWVVMSRYWGQNWTTNVNLTGQSVSLRVTTSDGITKDFTDVMPASWGFGQTFDGKTNF

SEQ ID NO: 34200 - protein, 256 aa, Arabidopsis thaliana
  misc_feature (1)..(256): Ceres Seq. ID no. 13605448
MTYVECFMIIMATWFMFISYSHGANVAAAPGTNGLDTAWYDARAAYYGDIHGGGTELEGACGYGDLNKHGYGLATAALSTALFNSGASCGACYEIMCSPNPQGCLSGSIKITATDLCPPGSAWCYLPNKHFDLSLPMFIKIAQVKAKMVPVRYRRVPCAKTGGVKFEVKGNPNILTILPYNVGGAGDIIAVSAKGSKTAWVVMSRYWGQNWTTNVNLTGQSVSLRVTTSDGITKDFTDVMPASWGFGQTFDGKTNF

SEQ ID NO: 34201 - DNA, 1302 bp, Arabidopsis thaliana
  misc_feature (1)..(1302): Ceres Seq. ID no. 13605449
tagacaagcagatttgcttcttctcgattctttgcaatttgcatgcattgctcatcaaaaaaattcctttctggcttttgttggaaaatagctgtataacttcaaatgttgaaactttgcttttcttcttcttctcttttggtcaaattttgtgttctctctagagcaaaaccctaattctctcaattctactcaaaattaatatctcttgcttccttgagaaagataaagatttgtgtttactaaggttgaggaaatgataatagcaaagcaatatcgttgcattcactcggcgacttgtcattgcacgaaaggacatcttagcgaagaagtattgtttcttatggttcagcatctaaactggaaccctaatgtgattgccactctatcttgtgtttgtaaatggtttgatgatctcgctaagcggttattgtggaaagaattctgtagagctagagcgcctaagatgatgagtgaccttcaatctagtggtagccatagtgttgatgggagttggagagcactagggaaacttttgatttactgctctggttcaagcaaaggtggactctttaatgatgttcaaatctctggtcattttgttcacagaacccgcttctctagaacatcgggaaggagctttcttcctccacaatgtcgaactgatgatattctctatgtttctgatccttgtgaacatttggatcaaggagaagatggtgatttgggattcttccgtgggattttcaaatcgttttctatgtcaaaggtgaggaagttgcttattaagaaagggacaccatttcatcctacggaagtttgtccgtattgcaaagcgaagctgtggagtatgcttcaggcgaaaatgataccacagagtgctagctgtagattgggggcttatgaagatagcattgagtattatgtttgtctcaatgggcatatgcttggagtttgtacactcttacctttgtctgattctgaaggggcctccgagtttcagtgactataaattgccgaccttgcgttttccgttgcagaaaatgcttgaagcttggtcagaggttatgatgtcgtctctctgtttcttatgtactggtgaattgttgctgctaaactttgggaatcatcactttgcaaagagttgatgttaagtgtatcataagctcaagttgtgcaaggtttgacgatttcagattctcaatttaccattggtgtgcatctacaaaccatttgttgattctgtgcatgtatatgtattaacaacacttgcaaattgtaatagacgcatatatttctgct

SEQ ID NO: 34202 - protein, 249 aa, Arabidopsis thaliana
  misc_feature (1)..(249): Ceres Seq. ID no. 13605450
MIIAKQYRCIHSATCHCTKGHLSEEVLFLMVQHLNWNPNVIATLSCVCKWFDDLAKRLLWKEFCRARAPKMMSDLQSSGSHSVDGSWRALGKLLIYCSGSSKGGLFNDVQISGHFVHRTRFSRTSGRSFLPPQCRTDDILYVSDPCEHLDQGEDGDLGFFRGIFKSFSMSKVRKLLIKKGTPFHPTEVCPYCKAKLWSMLQAKMIPQSASCRLGAYEDSIEYYVCLNGHMLGVCTLLPLSDSEGASEFQ

SEQ ID NO: 34203 - protein, 220 aa, Arabidopsis thaliana
  misc_feature (1)..(220): Ceres Seq. ID no. 13605451
MVQHLNWNPNVIATLSCVCKWFDDLAKRLLWKEFCRARAPKMMSDLQSSGSHSVDGSWRALGKLLIYCSGSSKGGLFNDVQISGHFVHRTRFSRTSGRSFLPPQCRTDDILYVSDPCEHLDQGEDGDLGFFRGIFKSFSMSKVRKLLIKKGTPFHPTEVCPYCKAKLWSMLQAKMIPQSASCRLGAYEDSIEYYVCLNGHMLGVCTLLPLSDSEGASEFQ

SEQ ID NO: 34204 - protein, 179 aa, Arabidopsis thaliana
  misc_feature (1)..(179): Ceres Seq. ID no. 13605452
MMSDLQSSGSHSVDGSWRALGKLLIYCSGSSKGGLFNDVQISGHFVHRTRFSRTSGRSFLPPQCRTDDILYVSDPCEHLDQGEDGDLGFFRGIFKSFSMSKVRKLLIKKGTPFHPTEVCPYCKAKLWSMLQAKMIPQSASCRLGAYEDSIEYYVCLNGHMLGVCTLLPLSDSEGASEFQ

SEQ ID NO: 34205 - DNA, 1911 bp, Arabidopsis thaliana
  misc_feature (1)..(1911): Ceres Seq. ID no. 13605495
gaaagaaagtcccaaaaacaaaaaaccaattttaaaaaacacaaacccattcgtgcgtctctggctaattaagttaaaacactaatggacacttcttcttcacttttgttcttctccttcttcttctttatcatcatcgtcatcttcaacaagatcaacggtctcagatcatccccagcttcaaagaaaaaacttaatgatcatcatgttacatcccagagtcacggaccaaagtttccacacggaagcttgggatggcccgtcatcggtgaaaccatcgagttcgtctcttctgcttactcagaccgtcctgagagtttcatggacaagcgtcgtctcatgtatgggagagtgtttaagtcgcatatttttggaacggcgacgatcgtgtcgacggatgctgaagtgaacagagccgttttacagagcgactcgacagctttcgtgccgttttacccaaaaacggtaagggagctaatgggaaaatcgtcgatacttcttatcaacgggagtttacatagacggttccatggattagtcggttctttcttaaagtcgccacttctcaaagctcaaatcgttagagacatgcacaagtttttgtcggaatccatggatctatggtccgaggaccaacctgtgctcctccaagacgtctccaagactgttgcattcaaagtacttgccaaggcattgataagtgtagagaaaggagaagatttagaagagctaaagagagagtttgaaaatttcatatcaggactcatgtcattaccaattaacttccctggaacgcaactccatagatctctccaagctaagaagaatatggtgaagcaagttgaaagaatcatagaaggcaaaattaggaaaacaaagaacaaggaggaagatgatgttattgcaaaggatgttgtggatgtgttgcttaaggactcaagtgaacatttaactcacaatttgattgctaacaatatgatcgacatgatgatccctggccacgattctgtccctgtcctcattacccttgccgtcaaattcctctctgattctcctgctgccctcaatctcctaacggaagaaaacatgaagctgaaaagtttgaaggaattgacaggagagccactatattggaatgactacttgtcgttaccttttacacaaaaggtgattacagagacactgagaatgggaaatgttataattggagtgatgagaaaggcgatgaaagatgttgaaataaaaggatatgtgataccaaaaggatggtgtttcttggcctatctcagatcagttcatcttgataagctttattatgagtctccctacaaatttaatccctggagatggcaagaaagggacatgaacacgagtagtttcagtccttttggaggtggtcagagattgtgccctggtctcgatttggctcgtcttgaaacttcagtttttcttcaccatcttgtcactcgcttcagatggatagcagaagaagacacaatcataaacttcccaacggtgcatatgaagaacaaattacccatttggatcaaaagaatataaatcatttttcttaagtgaaaaatggagaatcagttttgcattatcaaactctaaaaggttaaagaagtcacacgagtgttttgtaagtgggaagtgaaaaagatagtgagacagcaaaaggtaagaaaaaaagagaacatgatggagtttggagacaaaaaatgattcacacgtgtggaagacgatagcacacatgccaactattttgtcgtattccttcacaaggcaaataaggacagaatcacaaaacctttttgttgaccgtatatatatatatatatatattttttttttttgaagtacaaaggtgtatgataattatgcatatgatatagaatcctaattttcatg

SEQ ID NO: 34206 - protein, 491 aa, Arabidopsis thaliana
  misc_feature (1)..(491): Ceres Seq. ID no. 13605496
MDTSSSLLFFSFFFFIIIVIFNKINGLRSSPASKKKLNDHHVTSQSHGPKFPHGSLGWPVIGETIEFVSSAYSDRPESFMDKRRLMYGRVFKSHIFGTATIVSTDAEVNRAVLQSDSTAFVPFYPKTVRELMGKSSILLINGSLHRRFHGLVGSFLKSPLLKAQIVRDMHKFLSESMDLWSEDQPVLLQDVSKTVAFKVLAKALISVEKGEDLEELKREFENFISGLMSLPINFPGTQLHRSLQAKKNMVKQVERIIEGKIRKTKNKEEDDVIAKDVVDVLLKDSSEHLTHNLIANNMIDMMIPGHDSVPVLITLAVKFLSDSPAALNLLTEENMKLKSLKELTGEPLYWNDYLSLPFTQKVITETLRMGNVIIGVMRKAMKDVEIKGYVIPKGWCFLAYLRSVHLDKLYYESPYKFNPWRWQERDMNTSSFSPFGGGQRLCPGLDLARLETSVFLHHLVTRFRWIAEEDTIINFPTVHMKNKLPIWIKRI

SEQ ID NO: 34207 - protein, 412 aa, Arabidopsis thaliana
  misc_feature (1)..(412): Ceres Seq. ID no. 13605497
MDKRRLMYGRVFKSHIFGTATIVSTDAEVNRAVLQSDSTAFVPFYPKTVRELMGKSSILLINGSLHRRFHGLVGSFLKSPLLKAQIVRDMHKFLSESMDLWSEDQPVLLQDVSKTVAFKVLAKALISVEKGEDLEELKREFENFISGLMSLPINFPGTQLHRSLQAKKNMVKQVERIIEGKIRKTKNKEEDDVIAKDVVDVLLKDSSEHLTHNLIANNMIDMMIPGHDSVPVLITLAVKFLSDSPAALNLLTEENMKLKSLKELTGEPLYWNDYLSLPFTQKVITETLRMGNVIIGVMRKAMKDVEIKGYVIPKGWCFLAYLRSVHLDKLYYESPYKFNPWRWQERDMNTSSFSPFGGGQRLCPGLDLARLETSVFLHHLVTRFRWIAEEDTIINFPTVHMKNKLPIWIKRI

SEQ ID NO: 34208 - protein, 406 aa, Arabidopsis thaliana
  misc_feature (1)..(406): Ceres Seq. ID no. 13605498
MYGRVFKSHIFGTATIVSTDAEVNRAVLQSDSTAFVPFYPKTVRELMGKSSILLINGSLHRRFHGLVGSFLKSPLLKAQIVRDMHKFLSESMDLWSEDQPVLLQDVSKTVAFKVLAKALISVEKGEDLEELKREFENFISGLMSLPINFPGTQLHRSLQAKKNMVKQVERIIEGKIRKTKNKEEDDVIAKDVVDVLLKDSSEHLTHNLIANNMIDMMIPGHDSVPVLITLAVKFLSDSPAALNLLTEENMKLKSLKELTGEPLYWNDYLSLPFTQKVITETLRMGNVIIGVMRKAMKDVEIKGYVIPKGWCFLAYLRSVHLDKLYYESPYKFNPWRWQERDMNTSSFSPFGGGQRLCPGLDLARLETSVFLHHLVTRFRWIAEEDTIINFPTVHMKNKLPIWIKRI

SEQ ID NO: 34209 - DNA, 1428 bp, Arabidopsis thaliana
  misc_feature (1)..(1428): Ceres Seq. ID no. 13605509
atcaataaacacaaaaacaaaagaagaagagaataaacaaaagaagaaaaaaaaagtattaaaacaaaatcaataaaaagagaataaaaaatggtgggttctcacaaagcaagcggagtgcttcttgtgctactagtggttatggccaccacaatagcaaacgggacacctgttgtcgatacagcaaaaaatgcagctacagcagttgaagatacagcaaaaaatgcagctacagcagttggcggtgcagctgcatcagttggtgctaaagtaacaggtgccaaaccaggcggtgcatcacttgatgttaaagcatcaggagccaaaggagacggcaaaactgatgatagtgcggcatttgcggctgcatggaaagaagcttgtgcagcagggagcacgattacagtgccaaaaggtgagtatttggtagagagcctagagttcaaaggtccatgcaaaggtccagtcactttggaattgaatggcaattttaaggctccggctacggtcaagaccactaagcctcatgccggatggattgatttcgaaaatctcgctgatttcactttgaatggaaacaaagctatttttgacggtcaagggtccctcgcttggaaggccaatgactgcgccaaaaccggcaaatgcaactctctccctatcaacatccgattcactggtctaacaaactcaaagattaacagtattacatcaacaaacagcaagcttttccacatgaacatccttaactgcaagaacataactcttacggatatcggtattgatgcacctccggagagtctcaacaccgatggtatccacatcggaaggtccaatggagtcaacttaattggggcaaagattaaaaccggagatgactgcgtttccattggagatggtaccgaaaatctcattgttgagaacgtagaatgtggaccaggacacggaatttccattggaagtcttggaagataccctaatgaacaaccagtaaaaggagtcaccgtgaggaaatgcctcatcaagaacactgacaatggtgttcgcatcaagacatggccaggatctccccccggtatcgcctccaacattcttttcgaagatatcacaatggacaatgttagccttcccgttctcatcgaccaagagtactgtccttatggccactgcaaagctggggtaccatcgaaagtgaagttgtcagacgtgactatcaagaacattaagggaacatcagcaacaaaggtagcagtgaagctaatgtgcagcaaaggcgttccttgcaccaatattgctctctctgacatcaacttggtccacaacggcaaagagggaccagctgtctcagcatgttctaacatcaagcctattctcagcggaaagttggttccagcggcttgcactgaagtcgctaaaccgggtccttaa

SEQ ID NO: 34210 - protein, 445 aa, Arabidopsis thaliana
  misc_feature (1)..(445): Ceres Seq. ID no. 13605510
MVGSHKASGVLLVLLVVMATTIANGTPVVDTAKNAATAVEDTAKNAATAVGGAAASVGAKVTGAKPGGASLDVKASGAKGDGKTDDSAAFAAAWKEACAAGSTITVPKGEYLVESLEFKGPCKGPVTLELNGNFKAPATVKTTKPHAGWIDFENLADFTLNGNKAIFDGQGSLAWKANDCAKTGKCNSLPINIRFTGLTNSKINSITSTNSKLFHMNILNCKNITLTDIGIDAPPESLNTDGIHIGRSNGVNLIGAKIKTGDDCVSIGDGTENLIVENVECGPGHGISIGSLGRYPNEQPVKGVTVRKCLIKNTDNGVRIKTWPGSPPGIASNILFEDITMDNVSLPVLIDQEYCPYGHCKAGVPSKVKLSDVTIKNIKGTSATKVAVKLMCSKGVPCTNIALSDINLVHNGKEGPAVSACSNIKPILSGKLVPAACTEVAKPGP

SEQ ID NO: 34211 - protein, 428 aa, Arabidopsis thaliana
  misc_feature (1)..(428): Ceres Seq. ID no. 13605511
MATTIANGTPVVDTAKNAATAVEDTAKNAATAVGGAAASVGAKVTGAKPGGASLDVKASGAKGDGKTDDSAAFAAAWKEACAAGSTITVPKGEYLVESLEFKGPCKGPVTLELNGNFKAPATVKTTKPHAGWIDFENLADFTLNGNKAIFDGQGSLAWKANDCAKTGKCNSLPINIRFTGLTNSKINSITSTNSKLFHMNILNCKNITLTDIGIDAPPESLNTDGIHIGRSNGVNLIGAKIKTGDDCVSIGDGTENLIVENVECGPGHGISIGSLGRYPNEQPVKGVTVRKCLIKNTDNGVRIKTWPGSPPGIASNILFEDITMDNVSLPVLIDQEYCPYGHCKAGVPSKVKLSDVTIKNIKGTSATKVAVKLMCSKGVPCTNIALSDINLVHNGKEGPAVSACSNIKPILSGKLVPAACTEVAKPGP

SEQ ID NO: 34212 - protein, 230 aa, Arabidopsis thaliana
  misc_feature (1)..(230): Ceres Seq. ID no. 13605512
MNILNCKNITLTDIGIDAPPESLNTDGIHIGRSNGVNLIGAKIKTGDDCVSIGDGTENLIVENVECGPGHGISIGSLGRYPNEQPVKGVTVRKCLIKNTDNGVRIKTWPGSPPGIASNILFEDITMDNVSLPVLIDQEYCPYGHCKAGVPSKVKLSDVTIKNIKGTSATKVAVKLMCSKGVPCTNIALSDINLVHNGKEGPAVSACSNIKPILSGKLVPAACTEVAKPGP

SEQ ID NO: 34213 - DNA, 1340 bp, Arabidopsis thaliana
  misc_feature (1)..(1340): Ceres Seq. ID no. 13605513
gtcttggtctccgacaggaccgactctgttctcgtgttcttttttccctgtcatttccagatttcataaagctaaaagatatctaatttctttgtttaccagagacttaaactggtttctgtatcttttactgggttctttcagatatataaatggatcaaatcgttaacgtggatgagtttcaagagctggccaaacaggccctccctaagatgtactatgatttctacaatggaggagcagaggatcaacacactctcaatgaaaatgtccaagctttccgtagaatcatgtttaggcctagggttcttgttgatgtgagcaacatagatatgtctacaagtatgttgggttacccaatctcagctcccatcatgattgctccaacagcaatgcataagttggctcatcctaaaggagaaatcgccacagcgaaagctgcagctgcgtgtaacactatcatgatagtatcattcatgtctacttgcactattgaggaggttgcttccagttgtaacgctgttcggtttcttcaaatatatgtgtacaagagacgtgatgtaacagctcagattgtgaaaagagctgaaaaagctggattcaaggctatagttctaactgttgatgttcccagacttggtagaagggaagcagatataaagaacaaaatgatatccccacagctgaagaattttgaaggcttagtttcaaccgaagtccgacctaatgaaggttcaggggttgaagcctttgcctctagtgcatttgatgcttcgttaagctggaaggatatcgaatggttaagatctattacaaagttgccaattctggtcaaagggttactcacacgtgaagacgctcttaaggctgttgaagccggtgtagatggaatagtggtatccaaccacggggctcgccagctcgactattccccggctacgataactgttttagaagaggttgttcatgctgtgaaaggtaggattccggttttgcttgatggaggagtaagacgaggaacagatgttttcaaagcgctggcgctcggagcacaagctgttcttatagggaggcctatagtctatgggcttgcagctaagggtgaagatggagtgaaaaaagtgattgatatgctgaaaaatgagtttgagattactatggccctttctggctgtccaaccattgatgacgtaaccagaaaccatgttaggacagagaatgagagaattaaatctatgctctgatcctaaaaccaacagatctagtctcagagacttaatcagacagttggacaacagtatgaaatactgtcaatgcacataaataaaaagctctatttc

SEQ ID NO: 34214 - protein, 363 aa, Arabidopsis thaliana
  misc_feature (1)..(363): Ceres Seq. ID no. 13605514
MDQIVNVDEFQELAKQALPKMYYDFYNGGAEDQHTLNENVQAFRRIMFRPRVLVDVSNIDMSTSMLGYPISAPIMIAPTAMHKLAHPKGEIATAKAAAACNTIMIVSFMSTCTIEEVASSCNAVRFLQIYVYKRRDVTAQIVKRAEKAGFKAIVLTVDVPRLGRREADIKNKMISPQLKNFEGLVSTEVRPNEGSGVEAFASSAFDASLSWKDIEWLRSITKLPILVKGLLTREDALKAVEAGVDGIVVSNHGARQLDYSPATITVLEEVVHAVKGRIPVLLDGGVRRGTDVFKALALGAQAVLIGRPIVYGLAAKGEDGVKKVIDMLKNEFEITMALSGCPTIDDVTRNHVRTENERIKSML

SEQ ID NO: 34215 - protein, 343 aa, Arabidopsis thaliana
  misc_feature (1)..(343): Ceres Seq. ID no. 13605515
MYYDFYNGGAEDQHTLNENVQAFRRIMFRPRVLVDVSNIDMSTSMLGYPISAPIMIAPTAMHKLAHPKGEIATAKAAAACNTIMIVSFMSTCTIEEVASSCNAVRFLQIYVYKRRDVTAQIVKRAEKAGFKAIVLTVDVPRLGRREADIKNKMISPQLKNFEGLVSTEVRPNEGSGVEAFASSAFDASLSWKDIEWLRSITKLPILVKGLLTREDALKAVEAGVDGIVVSNHGARQLDYSPATITVLEEVVHAVKGRIPVLLDGGVRRGTDVFKALALGAQAVLIGRPIVYGLAAKGEDGVKKVIDMLKNEFEITMALSGCPTIDDVTRNHVRTENERIKSML

SEQ ID NO: 34216 - protein, 317 aa, Arabidopsis thaliana
  misc_feature (1)..(317): Ceres Seq. ID no. 13605516
MFRPRVLVDVSNIDMSTSMLGYPISAPIMIAPTAMHKLAHPKGEIATAKAAAACNTIMIVSFMSTCTIEEVASSCNAVRFLQIYVYKRRDVTAQIVKRAEKAGFKAIVLTVDVPRLGRREADIKNKMISPQLKNFEGLVSTEVRPNEGSGVEAFASSAFDASLSWKDIEWLRSITKLPILVKGLLTREDALKAVEAGVDGIVVSNHGARQLDYSPATITVLEEVVHAVKGRIPVLLDGGVRRGTDVFKALALGAQAVLIGRPIVYGLAAKGEDGVKKVIDMLKNEFEITMALSGCPTIDDVTRNHVRTENERIKSML

SEQ ID NO: 34217 - DNA, 1854 bp, Arabidopsis thaliana
  misc_feature (1)..(1854): Ceres Seq. ID no. 13605517
actctaaagcctttttcccctcttctcattctcgagctccggacttgtcttgaaaccgtgaaggaatctgtatcttttgtatgttacccattttattgtcgttaagaatcaatttagaggcaaaacgccgagaggtttgcccgggagagtgtttttacatcgatcagggtttaagcagaggttggtttgtcatttcgccagtttgcttcttcaaattcactctacgatgaagtgagaacaacaaacaaaacatagataagatagagaccttgggactgttggaagatggagtctgtgaaaccattggatgttgtttcttcaggaaaaggaaaactcagacgcacatttgctaaagtcatcaacatgaaaaagctaaccggtgttgttccagaaggtaacaacaaggttgaaagagtgaagaagagccaagaaaaggtgaagttggataaagatttagcaaagaatgctgcaaatctgtctgagtcctttgacaagctggaggaagagtatgagaaaagactggccatggaggctcttcttgcaaagctgtttgctacgatttcttcgataaaatctggttatgcgcagttgcagtatgctcagtctccttatgatccaaatgggattcagaaagcagataacttggtagtagcagagctgaagacattatcagagctgaaacagagtttcttgaagaaacagcttgatcctaatcctgatagaactcttgttcttgcggagattcaagagctaagaagcgtcttaaagacttatgagatcatggggaagaagctggagtgtcagttaaagctcaaagactctgagatcatatttctcaaagaaaagtttcaagaatccatgactcagaacaagttgatggagaagagattaaaccaaagtggccaactttgcaatccattggatcataatcttcatctatcggcggtaagttcgacccatttcgttacttatctgcaccacactgtcaaatccatccgaggattcgtcaagttgatggttgagcagatgaaactcgctgcttgggacatcgatatggctgctgagttaattcagcctgatgtactctattacaagcaagaccacaagtgttttgccttggagcattatgtctgcaagataatgcttgaagcttttcaactaccttacttctcaaacgaatcatcgaagaagacgagcagagaagacaaagcaatgttctttgagagattcacagagcttagatcgatgaaaccaagagagtatttagcatctcggcctaaatcaagattggctaagttttgcagaactaagtatttgcagctcatacatccaaagatggagcaggcattcttcggacatttgcatcaaagaaaccaagtcactgcaggggagtttccagagacgagcttgtgcactgcgtttctcgaaatggcgaaaagggtttggcttttacattgccttgctttctccttcgatcctgaagcttcaatctttcaagtatctagaggttgcagattctccgaagtgtacatgaagagcgtgtcggaggaagcgtttttctcaccggagcaagaagaaagctcgtcggaaactgaaccgggggttgcgtttacggttgttcctgggtttagaattgggaaaacgacgatacaatgtgaggtctacctctcgcgttcatgtcaacgccgtcagagcagatagattccggtgatgacgtcacaggggtattagggtaatttatcttggggaactttttgggggtaggaaaatatatgagagaaaatttgttgaccgttggattaagagaagaggcaagtatgtatgttgcttgttgagatttatggtttttatttt

SEQ ID NO: 34218 - protein, 471 aa, Arabidopsis thaliana
  misc_feature (1)..(471): Ceres Seq. ID no. 13605518
MESVKPLDVVSSGKGKLRRTFAKVINMKKLTGVVPEGNNKVERVKKSQEKVKLDKDLAKNAANLSESFDKLEEEYEKRLAMEALLAKLFATISSIKSGYAQLQYAQSPYDPNGIQKADNLVVAELKTLSELKQSFLKKQLDPNPDRTLVLAEIQELRSVLKTYEIMGKKLECQLKLKDSEIIFLKEKFQESMTQNKLMEKRLNQSGQLCNPLDHNLHLSAVSSTHFVTYLHHTVKSIRGFVKLMVEQMKLAAWDIDMAAELIQPDVLYYKQDHKCFALEHYVCKIMLEAFQLPYFSNESSKKTSREDKAMFFERFTELRSMKPREYLASRPKSRLAKFCRTKYLQLIHPKMEQAFFGHLHQRNQVTAGEFPETSLCTAFLEMAKRVWLLHCLAFSFDPEASIFQVSRGCRFSEVYMKSVSEEAFFSPEQEESSSETEPGVAFTVVPGFRIGKTTIQCEVYLSRSCQRRQSR

SEQ ID NO: 34219 - protein, 445 aa, Arabidopsis thaliana
  misc_feature (1)..(445): Ceres Seq. ID no. 13605519
MKKLTGVVPEGNNKVERVKKSQEKVKLDKDLAKNAANLSESFDKLEEEYEKRLAMEALLAKLFATISSIKSGYAQLQYAQSPYDPNGIQKADNLVVAELKTLSELKQSFLKKQLDPNPDRTLVLAEIQELRSVLKTYEIMGKKLECQLKLKDSEIIFLKEKFQESMTQNKLMEKRLNQSGQLCNPLDHNLHLSAVSSTHFVTYLHHTVKSIRGFVKLMVEQMKLAAWDIDMAAELIQPDVLYYKQDHKCFALEHYVCKIMLEAFQLPYFSNESSKKTSREDKAMFFERFTELRSMKPREYLASRPKSRLAKFCRTKYLQLIHPKMEQAFFGHLHQRNQVTAGEFPETSLCTAFLEMAKRVWLLHCLAFSFDPEASIFQVSRGCRFSEVYMKSVSEEAFFSPEQEESSSETEPGVAFTVVPGFRIGKTTIQCEVYLSRSCQRRQSR

SEQ ID NO: 34220 - protein, 391 aa, Arabidopsis thaliana
  misc_feature (1)..(391): Ceres Seq. ID no. 13605520
MEALLAKLFATISSIKSGYAQLQYAQSPYDPNGIQKADNLVVAELKTLSELKQSFLKKQLDPNPDRTLVLAEIQELRSVLKTYEIMGKKLECQLKLKDSEIIFLKEKFQESMTQNKLMEKRLNQSGQLCNPLDHNLHLSAVSSTHFVTYLHHTVKSIRGFVKLMVEQMKLAAWDIDMAAELIQPDVLYYKQDHKCFALEHYVCKIMLEAFQLPYFSNESSKKTSREDKAMFFERFTELRSMKPREYLASRPKSRLAKFCRTKYLQLIHPKMEQAFFGHLHQRNQVTAGEFPETSLCTAFLEMAKRVWLLHCLAFSFDPEASIFQVSRGCRFSEVYMKSVSEEAFFSPEQEESSSETEPGVAFTVVPGFRIGKTTIQCEVYLSRSCQRRQSR

SEQ ID NO: 34221 - DNA, 867 bp, Arabidopsis thaliana
  misc_feature (1)..(867): Ceres Seq. ID no. 13605521
ctttttctccttttgtccgtacgcgttttcttaccggtgacctgaaagtctcaaaaaatggcggcgtatagagctgacgatgattacgatttcctctacaaggtggtattaatcggtgattccggcgtcggtaaatccaatctgctttctcgattcacgcgcaacgagttcagcctcgagtctaaatccaccatcggtgtcgaattcgccacccgaagcattcatgtcgatgaaaaaatcgtcaaggctcagatttgggacaccgccggccaagagagataccgagcaatcacaagcgcatactatcgaggagctgttggggctttgcttgtttatgatgttacacggcatgtgacatttgagaacgttgagagatggttgaaggagcttagagaccacacagaggccaacattgtgatcatgcttgttgggaataaagcggatctacgtcacctaagagctgtttcaactgaagatgctaaagcctttgcagagagagagaacacattctttatggagacatctgcacttgaagctttgaacgttgagaatgctttcactgaagtgctttctcaaatataccgtgttgcaagcaagaaggcgttggatattggtgatgatcacactactcttcctaaaggacaaagtattaatgttgggtctaaggatgatgtttctgaggttaagaaggttggatgctgctcaagttgatcttgatcaagccattttgtctgtttcttaggcaagaatatagtttgattatctatggaagacatgcagatgattctttcttgtgtttttcctttagttgcttcttttggtgtaagtttctcagatcctgttttaaatattattttttacacaatc

SEQ ID NO: 34222 - protein, 217 aa, Arabidopsis thaliana
  misc_feature (1)..(217): Ceres Seq. ID no. 13605522
MAAYRADDDYDFLYKVVLIGDSGVGKSNLLSRFTRNEFSLESKSTIGVEFATRSIHVDEKIVKAQIWDTAGQERYRAITSAYYRGAVGALLVYDVTRHVTFENVERWLKELRDHTEANIVIMLVGNKADLRHLRAVSTEDAKAFAERENTFFMETSALEALNVENAFTEVLSQIYRVASKKALDIGDDHTTLPKGQSINVGSKDDVSEVKKVGCCSS

SEQ ID NO: 34223 - DNA, 693 bp, Arabidopsis thaliana
  misc_feature (1)..(693): Ceres Seq. ID no. 13605535
atctttagccgccgacttggtatcatcaaatcgaggagattcgaagaagcatggtgggatttaagaacagatacatgttaatggaagtttttctggatccggacaaggatcttctcggagaaggaacaccgatcattcttacacaattcaatctctcgaaagcaatcaaagacagtatcctcgtcaatttcggcgagtgtggtctaggttcgtctctcggttccttccaagtgaaatatgtgaatccaatcacgaagctatgcattgtaagatcatcaagagaagaacacagacaagtttggttagcaatcacattggtcaaaagcatcggaaactgtccggtgatcttaaacttgctcgatattagcggttgcatcagagcgtgtagagacacagccttgaagtgcgacaaggagaagtttgagcagtgtagcaaaagcttgtctgaagaggagattaggcagatgaatacttctcttgagaagatcaaactattggaaaactgaaacttttctagaccttttttccttcgaatttgacccctaagttttgaaattgtacaatctttgtatttttcttaattctgaaatacaaagggataagaaacagcatcattccctgaaaagattgtttgcgatttgaatcactgggtttttatatgttggaattaaaataagagggtgtgaattgttg

SEQ ID NO: 34224 - protein, 151 aa, Arabidopsis thaliana
  misc_feature (1)..(151): Ceres Seq. ID no. 13605536
MVGFKNRYMLMEVFLDPDKDLLGEGTPIILTQFNLSKAIKDSILVNFGECGLGSSLGSFQVKYVNPITKLCIVRSSREEHRQVWLAITLVKSIGNCPVILNLLDISGCIRACRDTALKCDKEKFEQCSKSLSEEEIRQMNTSLEKIKLLEN

SEQ ID NO: 34225 - protein, 143 aa, Arabidopsis thaliana
  misc_feature (1)..(143): Ceres Seq. ID no. 13605537
MLMEVFLDPDKDLLGEGTPIILTQFNLSKAIKDSILVNFGECGLGSSLGSFQVKYVNPITKLCIVRSSREEHRQVWLAITLVKSIGNCPVILNLLDISGCIRACRDTALKCDKEKFEQCSKSLSEEEIRQMNTSLEKIKLLEN

SEQ ID NO: 34226 - protein, 141 aa, Arabidopsis thaliana
  misc_feature (1)..(141): Ceres Seq. ID no. 13605538
MEVFLDPDKDLLGEGTPIILTQFNLSKAIKDSILVNFGECGLGSSLGSFQVKYVNPITKLCIVRSSREEHRQVWLAITLVKSIGNCPVILNLLDISGCIRACRDTALKCDKEKFEQCSKSLSEEEIRQMNTSLEKIKLLEN

SEQ ID NO: 34227 - DNA, 1097 bp, Arabidopsis thaliana
  misc_feature (1)..(1097): Ceres Seq. ID no. 13605565
attttcagctaaaagcaatggagtcatcacttccccaagttgctgcacttgatcgttcaactctactcaaagctttcgacgagactaaaaccggcgtgaaaggccttatcgacgccggaatcacagagattccttcgatatttcgtgcacctccggctactttaacaagtccaaaaccaccttcctcctctgatttctccatccccacaatcgatctcaaaggaggtggcacggactcgatcacgcggcggagcttggtggagaagatcggagacgcggcagagaaatggggatttttccaggtgatcaaccacgggatcccgatggatgtgttggagaagatgatagatgggattcgtgagtttcacgagcaagacactgaagtgaagaaagggttttactctcgagatccagctagtaagatggtatacagcagcaacttcgatctgtttagctcaccggcggcgaattggagagatacacttggttgttatacagcaccagatcccccgagaccggaggacttacccgccacttgtggggagatgatgattgagtactcaaaggaagtgatgaaattgggtaaattactcttcgagcttctctcggaagctctagggttaaacactaatcacctcaaggacatggattgcactaactccttgctgttgctcggccattattacccgccatgtccccaacccgaccttactctaggcttaacgaaacactccgacaactcttttctcactattcttcttcaagaccatatcggagggcttcaagttcttcatgaccaatattgggttgatgttcctcctgtccctggagctcttgttgttaaccttataacaaacgacaagttcataagcgtggagcatagggttttggccaatgtagctggaccgagaatttcagtggcatgtttcttcagctcgtatttgatggcgaatcctcgagtttatggacccatcaaagagattttgtctgaagaaaaccctcctaattatagagacactactattacagagtatgcaaagttctacagatccaaaggattcgatggtacctctggattactctatctcaagatctga

SEQ ID NO: 34228 - protein, 364 aa, Arabidopsis thaliana
  misc_feature (1)..(364): Ceres Seq. ID no. 13605566
FQLKAMESSLPQVAALDRSTLLKAFDETKTGVKGLIDAGITEIPSIFRAPPATLTSPKPPSSSDFSIPTIDLKGGGTDSITRRSLVEKIGDAAEKWGFFQVINHGIPMDVLEKMIDGIREFHEQDTEVKKGFYSRDPASKMVYSSNFDLFSSPAANWRDTLGCYTAPDPPRPEDLPATCGEMMIEYSKEVMKLGKLLFELLSEALGLNTNHLKDMDCTNSLLLLGHYYPPCPQPDLTLGLTKHSDNSFLTILLQDHIGGLQVLHDQYWVDVPPVPGALVVNLITNDKFISVEHRVLANVAGPRISVACFFSSYLMANPRVYGPIKEILSEENPPNYRDTTITEYAKFYRSKGFDGTSGLLYLKI

SEQ ID NO: 34229 - protein, 359 aa, Arabidopsis thaliana
  misc_feature (1)..(359): Ceres Seq. ID no. 13605567
MESSLPQVAALDRSTLLKAFDETKTGVKGLIDAGITEIPSIFRAPPATLTSPKPPSSSDFSIPTIDLKGGGTDSITRRSLVEKIGDAAEKWGFFQVINHGIPMDVLEKMIDGIREFHEQDTEVKKGFYSRDPASKMVYSSNFDLFSSPAANWRDTLGCYTAPDPPRPEDLPATCGEMMIEYSKEVMKLGKLLFELLSEALGLNTNHLKDMDCTNSLLLLGHYYPPCPQPDLTLGLTKHSDNSFLTILLQDHIGGLQVLHDQYWVDVPPVPGALVVNLITNDKFISVEHRVLANVAGPRISVACFFSSYLMANPRVYGPIKEILSEENPPNYRDTTITEYAKFYRSKGFDGTSGLLYLKI

SEQ ID NO: 34230 - protein, 257 aa, Arabidopsis thaliana
  misc_feature (1)..(257): Ceres Seq. ID no. 13605568
MDVLEKMIDGIREFHEQDTEVKKGFYSRDPASKMVYSSNFDLFSSPAANWRDTLGCYTAPDPPRPEDLPATCGEMMIEYSKEVMKLGKLLFELLSEALGLNTNHLKDMDCTNSLLLLGHYYPPCPQPDLTLGLTKHSDNSFLTILLQDHIGGLQVLHDQYWVDVPPVPGALVVNLITNDKFISVEHRVLANVAGPRISVACFFSSYLMANPRVYGPIKEILSEENPPNYRDTTITEYAKFYRSKGFDGTSGLLYLKI

SEQ ID NO: 34231 - DNA, 1292 bp, Arabidopsis thaliana
  misc_feature (1)..(1292): Ceres Seq. ID no. 13605569
gtcttacgagagaccaaaacgatggagagcacgaagattgctccttcattcgatcgtgccagtgagcttaaagctttcgatgagacgaagactggtgtgaaaggactcgttgactctggaatctcaaagattccacgcattttccatcactcatctgtcgaactagcaaaccctaaaccacttccctcggacctgctacatctcaagacgatcccaacgatcgatctcggaggacgggacttccaggacgcgattaagcacaagaacgcgattgaagggattaaagaagcagctgccaagtggggtttcttccaagtgatcaaccatggagtttcgctcgagcttcttgagaagatgaaagatggagttcgtgactttcatgagcaacctcctgaagtgaggaaagatttgtacagccgcgatttcggcagaaagtttatctatttaagtaatttcgatctctacactgctgcagctgcgaattggagagacacattctattgttacatggctccagatcctccagaaccacaggatctgccagagatttgtagggatgttatgatggaatactcaaagcaagtgatgattttgggtgaatttctgtttgagcttttgtcagaagcactagggttgaaccctaatcacctcaaggacatggagtgcttaaagggtttgcgcatgctttgccactacttcccaccgtgtccggagcctgacctaacttttggcacaagtaagcactccgacggctcttttcttaccgtccttctaccagataacatagaagggcttcaggtttgtcgtgagggatactggttcgatgttcctcatgttcccggcgctctcatcatcaacatcggagatcttctgcagcttataacaaacgacaagttcatcagtttgaagcatagagtattggcgaacagagccacaagagctcgagtctctgtcgcatgtttcttccatacccacgtaaaaccaaatcctagagtgtacggacccattaaagagcttgtgtccgaagaaaatcctccaaagtacagagagaccaccatcagagattacgctacttacttcaatggcaaaggacttggcgggacctctgctttgctggattttaaagtatgaatcatgccgagctactactttctcacagatatacgacatgacattatatgtaacatgttggagatgtgtgaaccaaatgtggaatttatgtattgaacattgtcatcaaggtttggtccaaataaagtgtaatcggatatggttaatcaattggattacgc

SEQ ID NO: 34232 - protein, 376 aa, Arabidopsis thaliana
  misc_feature (1)..(376): Ceres Seq. ID no. 13605570
VLRETKTMESTKIAPSFDRASELKAFDETKTGVKGLVDSGISKIPRIFHHSSVELANPKPLPSDLLHLKTIPTIDLGGRDFQDAIKHKNAIEGIKEAAAKWGFFQVINHGVSLELLEKMKDGVRDFHEQPPEVRKDLYSRDFGRKFIYLSNFDLYTAAAANWRDTFYCYMAPDPPEPQDLPEICRDVMMEYSKQVMILGEFLFELLSEALGLNPNHLKDMECLKGLRMLCHYFPPCPEPDLTFGTSKHSDGSFLTVLLPDNIEGLQVCREGYWFDVPHVPGALIINIGDLLQLITNDKFISLKHRVLANRATRARVSVACFFHTHVKPNPRVYGPIKELVSEENPPKYRETTIRDYATYFNGKGLGGTSALLDFKV

SEQ ID NO: 34233 - protein, 369 aa, Arabidopsis thaliana
  misc_feature (1)..(369): Ceres Seq. ID no. 13605571
MESTKIAPSFDRASELKAFDETKTGVKGLVDSGISKIPRIFHHSSVELANPKPLPSDLLHLKTIPTIDLGGRDFQDAIKHKNAIEGIKEAAAKWGFFQVINHGVSLELLEKMKDGVRDFHEQPPEVRKDLYSRDFGRKFIYLSNFDLYTAAAANWRDTFYCYMAPDPPEPQDLPEICRDVMMEYSKQVMILGEFLFELLSEALGLNPNHLKDMECLKGLRMLCHYFPPCPEPDLTFGTSKHSDGSFLTVLLPDNIEGLQVCREGYWFDVPHVPGALIINIGDLLQLITNDKFISLKHRVLANRATRARVSVACFFHTHVKPNPRVYGPIKELVSEENPPKYRETTIRDYATYFNGKGLGGTSALLDFKV

SEQ ID NO: 34234 - protein, 258 aa, Arabidopsis thaliana
  misc_feature (1)..(258): Ceres Seq. ID no. 13605572
MKDGVRDFHEQPPEVRKDLYSRDFGRKFIYLSNFDLYTAAAANWRDTFYCYMAPDPPEPQDLPEICRDVMMEYSKQVMILGEFLFELLSEALGLNPNHLKDMECLKGLRMLCHYFPPCPEPDLTFGTSKHSDGSFLTVLLPDNIEGLQVCREGYWFDVPHVPGALIINIGDLLQLITNDKFISLKHRVLANRATRARVSVACFFHTHVKPNPRVYGPIKELVSEENPPKYRETTIRDYATYFNGKGLGGTSALLDFKV

SEQ ID NO: 34235 - DNA, 1581 bp, Arabidopsis thaliana
  misc_feature (1)..(1581): Ceres Seq. ID no. 13605573
ataaagaaaaaaaagtaaagagatgaagacagcagagctcatattcgttcctctgccggagaccggccatctcttgtcaacgatcgagtttggaaagcgtctactcaatctagaccgtcggatttctatgattacaatcctctccatgaatcttccttacgctcctcacgccgacgcttctcttgcttcgctaacagcctccgagcctggtatccgaatcatcagtctcccggagatccacgatccacctccgatcaagcttcttgacacttcctccgagacttacatcctcgatttcatccataaaaacataccttgtctcagaaaaaccatccaagatttagtctcatcatcatcatcttccggaggtggtagtagtcatgtcgccggcttgattcttgatttcttctgcgttggtttgatcgacatcggccgtgaggtaaaccttccttcctatatcttcatgacttccaactttggtttcttaggggttctacagtatctcccggaacgacaacgtttgactccgtcggagttcgatgagagctccggcgaggaagagttacatattccggcgtttgtgaaccgtgttcccgccaaggttctgccgccaggtgtgttcgataaactctcttacgggtctctggtcaaaatcggcgagcgattacatgaagccaagggtattttggttaattcatttacccaagtggagccttatgctgctgaacatttttctcaaggacgagattaccctcacgtgtatcctgttgggccggttctcaacttaacgggccgtacaaatccgggtctagcttcggcccaatataaagagatgatgaagtggcttgacgagcaaccagactcgtcggttttgttcctgtgtttcgggagcatgggagtcttccctgcacctcagatcacagagattgctcacgcgctcgagcttatcgggtgcaggttcatctgggcgatccgtacgaacatggcgggagatggcgatcctcaggagccgcttccagaaggatttgtcgatcgaacaatgggccgtggaattgtgtgtagttgggctccacaagtggatatcttggcccacaaggcaacaggtggattcgtttctcactgcgggtggaattccgtccaagagagtctatggtacggtgtacctattgcaacgtggccaatgtatgcggagcaacaactgaacgcatttgagatggtgaaggagttgggcttagcagtggagataaggcttgactacgtggcggatggtgatagggttactttggagatcgtgtcagccgatgaaatagccacagccgtccgatcattgatggatagtgataaccccgtgagaaagaaggttatagaaaaatcttcagtggcgaggaaagctgttggtgatggtgggtcttctacggtggccacatgtaattttatcaaagatattcttggggatcacttttgagttttgaccatttcactttcagagcaagataattttgtaatttgtaataaaaataaacaaatgttatcaatttattatggactaaatgttaatcaacgccatttgtgcttgaagac

SEQ ID NO: 34236 - protein, 480 aa, Arabidopsis thaliana
  misc_feature (1)..(480): Ceres Seq. ID no. 13605574
MKTAELIFVPLPETGHLLSTIEFGKRLLNLDRRISMITILSMNLPYAPHADASLASLTASEPGIRIISLPEIHDPPPIKLLDTSSETYILDFIHKNIPCLRKTIQDLVSSSSSSGGGSSHVAGLILDFFCVGLIDIGREVNLPSYIFMTSNFGFLGVLQYLPERQRLTPSEFDESSGEEELHIPAFVNRVPAKVLPPGVFDKLSYGSLVKIGERLHEAKGILVNSFTQVEPYAAEHFSQGRDYPHVYPVGPVLNLTGRTNPGLASAQYKEMMKWLDEQPDSSVLFLCFGSMGVFPAPQITEIAHALELIGCRFIWAIRTNMAGDGDPQEPLPEGFVDRTMGRGIVCSWAPQVDILAHKATGGFVSHCGWNSVQESLWYGVPIATWPMYAEQQLNAFEMVKELGLAVEIRLDYVADGDRVTLEIVSADEIATAVRSLMDSDNPVRKKVIEKSSVARKAVGDGGSSTVATCNFIKDILGDHF

SEQ ID NO: 34237 - protein, 445 aa, Arabidopsis thaliana
  misc_feature (1)..(445): Ceres Seq. ID no. 13605575
MITILSMNLPYAPHADASLASLTASEPGIRIISLPEIHDPPPIKLLDTSSETYILDFIHKNIPCLRKTIQDLVSSSSSSGGGSSHVAGLILDFFCVGLIDIGREVNLPSYIFMTSNFGFLGVLQYLPERQRLTPSEFDESSGEEELHIPAFVNRVPAKVLPPGVFDKLSYGSLVKIGERLHEAKGILVNSFTQVEPYAAEHFSQGRDYPHVYPVGPVLNLTGRTNPGLASAQYKEMMKWLDEQPDSSVLFLCFGSMGVFPAPQITEIAHALELIGCRFIWAIRTNMAGDGDPQEPLPEGFVDRTMGRGIVCSWAPQVDILAHKATGGFVSHCGWNSVQESLWYGVPIATWPMYAEQQLNAFEMVKELGLAVEIRLDYVADGDRVTLEIVSADEIATAVRSLMDSDNPVRKKVIEKSSVARKAVGDGGSSTVATCNFIKDILGDHF

SEQ ID NO: 34238 - protein, 439 aa, Arabidopsis thaliana
  misc_feature (1)..(439): Ceres Seq. ID no. 13605576
MNLPYAPHADASLASLTASEPGIRIISLPEIHDPPPIKLLDTSSETYILDFIHKNIPCLRKTIQDLVSSSSSSGGGSSHVAGLILDFFCVGLIDIGREVNLPSYIFMTSNFGFLGVLQYLPERQRLTPSEFDESSGEEELHIPAFVNRVPAKVLPPGVFDKLSYGSLVKIGERLHEAKGILVNSFTQVEPYAAEHFSQGRDYPHVYPVGPVLNLTGRTNPGLASAQYKEMMKWLDEQPDSSVLFLCFGSMGVFPAPQITEIAHALELIGCRFIWAIRTNMAGDGDPQEPLPEGFVDRTMGRGIVCSWAPQVDILAHKATGGFVSHCGWNSVQESLWYGVPIATWPMYAEQQLNAFEMVKELGLAVEIRLDYVADGDRVTLEIVSADEIATAVRSLMDSDNPVRKKVIEKSSVARKAVGDGGSSTVATCNFIKDILGDHF

SEQ ID NO: 34239 - DNA, 1685 bp, Arabidopsis thaliana
  misc_feature (1)..(1685): Ceres Seq. ID no. 13605584
atctcaataaacaaacactaacaatggtggtcgaagaagattcacgtctcataaatctccaacacaagtacaacccgacaatgcccgaggtggtggaggagctgaagagaatttgggacataagttttccggtggccgccatgagcatattaaactacctaaagaacatgacatccgtcgtgtgtatgggacgactcggtagccttgagctcgcaggaggagccttagccatcggtttcaccaacatcaccggttactccgtcctctctggtttagccaccggtatggaaccattatgtggtcaagccatcggttctaaaaacccttcactcgcttccttaaccctcaagcgaaccatcttcctccttctcttagcttctcttcccatatcactcctttggctaaacctcgcgcctctaatgctgatgctccgccaacaacatgatatcactcgtgtcgcatctctctattgttccttctctttgcctgatcttctcgctaatagtttccttcatcctttacgtatttacttacgttgtaaaggcaccacttggcctttgatgtggtgcacgttagtctccgtccttcttcatcttcccattactgctttcttcacgttttacatctctctcggagttcccggagtcgccgtctcttcttttcttaccaacttcatctctttgtcgcttctcctttgctacatctacttggaaaacaacaacaacgacaaaaccacttccaagtctctttgtcttgatacgccgttgatgctgtatggttcgagagactccggtgaaaatgatgtgtggtcaacgctggttaaattcgctgttccgagctgtatagcggtttgcttggagtggtggtggtacgagttcatgacggtcctcgctggatatctccccgagccgaaggtggcgctagcagcagccgccatcgtgatacaaacaacctcattgatgtatacaatcccaacggccctctcggccgcggtatccacgagggtaagcaacgagttaggagcaggacggccagagaaagcaaaaacagcggcgactgtggctgtcggagccgccgtggcagtgtcagtgtttggacttgtggggaccaccgtggggagagaagcttggggaaaagttttcaccgccgacaaagttgtcctcgagctgacggcggcggttattccggtgattggagcttgtgagcttgccaactgtcctcagaccattagctgtggaatcttacgtggcagtgcgaggccaggtataggggccaagattaatttctacgccttctatgtagttggagcaccagtggcggttgttttagcgtttgtgtggggtttaggcttcatgggcctatgctatggcttgcttggggcacagctagcttgtgcaatctccattttgaccgttgtttataacacagattggaacaaagagtccttgaaggctcatgacttggtgggcaagaacgtcatttcacctaatgtcgatcaaattattgtcaaatgcgaagaaggcctacactaacagtttttccttctcttttctttttgttcttcatatatactatctccatttatgtctcaatgatttgcttttgttttaaaacttatacatttatgtaagtgtcttcattggacaaggacagaatgtaaaactttatgaaacacaaaactgttg

SEQ ID NO: 34240 - protein, 509 aa, Arabidopsis thaliana
  misc_feature (1)..(509): Ceres Seq. ID no. 13605585
LNKQTLTMVVEEDSRLINLQHKYNPTMPEVVEELKRIWDISFPVAAMSILNYLKNMTSVVCMGRLGSLELAGGALAIGFTNITGYSVLSGLATGMEPLCGQAIGSKNPSLASLTLKRTIFLLLLASLPISLLWLNLAPLMLMLRQQHDITRVASLYCSFSLPDLLANSFLHPLRIYLRCKGTTWPLMWCTLVSVLLHLPITAFFTFYISLGVPGVAVSSFLTNFISLSLLLCYIYLENNNNDKTTSKSLCLDTPLMLYGSRDSGENDVWSTLVKFAVPSCIAVCLEWWWYEFMTVLAGYLPEPKVALAAAAIVIQTTSLMYTIPTALSAAVSTRVSNELGAGRPEKAKTAATVAVGAAVAVSVFGLVGTTVGREAWGKVFTADKVVLELTAAVIPVIGACELANCPQTISCGILRGSARPGIGAKINFYAFYVVGAPVAVVLAFVWGLGFMGLCYGLLGAQLACAISILTVVYNTDWNKESLKAHDLVGKNVISPNVDQIIVKCEEGLH

SEQ ID NO: 34241 - protein, 502 aa, Arabidopsis thaliana
  misc_feature (1)..(502): Ceres Seq. ID no. 13605586
MVVEEDSRLINLQHKYNPTMPEVVEELKRIWDISFPVAAMSILNYLKNMTSVVCMGRLGSLELAGGALAIGFTNITGYSVLSGLATGMEPLCGQAIGSKNPSLASLTLKRTIFLLLLASLPISLLWLNLAPLMLMLRQQHDITRVASLYCSFSLPDLLANSFLHPLRIYLRCKGTTWPLMWCTLVSVLLHLPITAFFTFYISLGVPGVAVSSFLTNFISLSLLLCYIYLENNNNDKTTSKSLCLDTPLMLYGSRDSGENDVWSTLVKFAVPSCIAVCLEWWWYEFMTVLAGYLPEPKVALAAAAIVIQTTSLMYTIPTALSAAVSTRVSNELGAGRPEKAKTAATVAVGAAVAVSVFGLVGTTVGREAWGKVFTADKVVLELTAAVIPVIGACELANCPQTISCGILRGSARPGIGAKINFYAFYVVGAPVAVVLAFVWGLGFMGLCYGLLGAQLACAISILTVVYNTDWNKESLKAHDLVGKNVISPNVDQIIVKCEEGLH

SEQ ID NO: 34242 - protein, 483 aa, Arabidopsis thaliana
  misc_feature (1)..(483): Ceres Seq. ID no. 13605587
MPEVVEELKRIWDISFPVAAMSILNYLKNMTSVVCMGRLGSLELAGGALAIGFTNITGYSVLSGLATGMEPLCGQAIGSKNPSLASLTLKRTIFLLLLASLPISLLWLNLAPLMLMLRQQHDITRVASLYCSFSLPDLLANSFLHPLRIYLRCKGTTWPLMWCTLVSVLLHLPITAFFTFYISLGVPGVAVSSFLTNFISLSLLLCYIYLENNNNDKTTSKSLCLDTPLMLYGSRDSGENDVWSTLVKFAVPSCIAVCLEWWWYEFMTVLAGYLPEPKVALAAAAIVIQTTSLMYTIPTALSAAVSTRVSNELGAGRPEKAKTAATVAVGAAVAVSVFGLVGTTVGREAWGKVFTADKVVLELTAAVIPVIGACELANCPQTISCGILRGSARPGIGAKINFYAFYVVGAPVAVVLAFVWGLGFMGLCYGLLGAQLACAISILTVVYNTDWNKESLKAHDLVGKNVISPNVDQIIVKCEEGLH

SEQ ID NO: 34243 - DNA, 2261 bp, Arabidopsis thaliana
  misc_feature (1)..(2261): Ceres Seq. ID no. 13605611
aaaacagagaattaaagaatcgatttagaccaaattgtatgtgattcgttcggacaagaagcgatgatgaggggatctcggtttctcctctctcgcgcttctctgtatcaccgtcttcgctctgatcatcaccatcacagtttctccagttttatcaaacgtagctcaattcagagatcaccagctatcaatgcattcttcaccgatccatctccatctccatctccagtcaacgcacgagtcttcttcttctcaacttcaacttcaactccaaatcaagatcaaaccaaaacagcatcatctaagaagatcctccgcacgatttcaagctatctatggatgaaagacaacccagaactccgattcagagtcatcgctgctttagcgtgtctcataggagctaagttcttgaatgttcaagttcctttcctcttcaaattatctatcgatttactctcttcatattcatcttcaacaatcactgattcaaatccttatctacttgctgctttcgctactccttcttccgttctcattggctatggcattgctcgatctggatcttcagcttttaacgagcttcgtactgctgttttctccaaagtatctctccgcacaatacgatctgtttctcgtaaagtgctctcgcatttacatgatcttgatcttcgttaccatttgaatcgagaaacaggagctttgaatagaatcattgaccgtggaagtcgcgcgattaacacgatcctctctgctatggttttcaatgttgttccaacgatcttggagatatcaatggtcacaggtatattagcatacaattttggacctgtttttgctttgatcacttctctttccgttggatcatacatagctttcacattggttgtgacacagtatagaactaagtttagaaaagctatgaaccaagctgataatgatgcaagcacaagagctattgattctcttgtaaactacgagactgttaagtattttaacaacgaagattacgaagcgagaaagtacgatgatttactcggaagatatgaagatgctgcattgcaaactcagaagagtcttgcgtttttagattttggacagagttttatatttagtacagctttgtcaacatcaatggtgttgtgttctcaagggattatgaatggagagatgacagttggtgatttggtgatggtgaatggtcttctctttcaattgtctcttcctctttactttctcggtggtgtttaccgtgaaaccgttcagggtcttgttgatatgaaatcattgttccagttgctagaggagagatccgatattggagataaagatacagagacaaagctacctcctcttgttctgagaggtggaagcatcagttttgagaatgtacattttagttatctgccagagagaaagattttggatgggatttcatttgaggtaccggcagggaaaagtgtagcgattgttggtagtagcggaagcggcaaatcgacgattcttagaatgattttcaggttctttgacacagattctggtaatgttaggattgatggtcaagatataaaggaagtgacactagagagtcttcgaagctgcattggagttgtccctcaagatactgtgctcttcaatgacacaatatttcacaacattcactatggaaacctttcagcaacagaagaagaggtgtacgatgcagctaggcgagcagtgattcacgatacgatcatgaaatttccggataaatattcgaccgcggtgggagaaagagggctgatgctgagtggtggagaaaaacaaagagtggcacttgctcgtgcctttctgaaatcaccagcgattctcttgtgtgacgaagcaacgaatgcgcttgatagtaaaaccgaggcagagataatgaaaacgttcaggtcgctagcgagtaacagaacatgcattttcattgcacataggctgaccactgcgatgcaatgtgatgagataatagtaatggagaaagggaaagtggtggaaaaagggacacaccaagtgttgttggagaaatctggcagatacgctaaattatggacacaacaaaacagtacactggaggtgtgaatctcaagagctagacagctagtgtttgggttctgttttcgcctcactaattctttttttttgctgacttcccttatttttggaatcatatatttgcaaatatcattgatggtactttgtagccttgttacaaaaaataaaacatatttgtaacctaatat

SEQ ID NO: 34244 - protein, 678 aa, Arabidopsis thaliana
  misc_feature (1)..(678): Ceres Seq. ID no. 13605612
MMRGSRFLLSRASLYHRLRSDHHHHSFSSFIKRSSIQRSPAINAFFTDPSPSPSPVNARVFFFSTSTSTPNQDQTKTASSKKILRTISSYLWMKDNPELRFRVIAALACLIGAKFLNVQVPFLFKLSIDLLSSYSSSTITDSNPYLLAAFATPSSVLIGYGIARSGSSAFNELRTAVFSKVSLRTIRSVSRKVLSHLHDLDLRYHLNRETGALNRIIDRGSRAINTILSAMVFNVVPTILEISMVTGILAYNFGPVFALITSLSVGSYIAFTLVVTQYRTKFRKAMNQADNDASTRAIDSLVNYETVKYFNNEDYEARKYDDLLGRYEDAALQTQKSLAFLDFGQSFIFSTALSTSMVLCSQGIMNGEMTVGDLVMVNGLLFQLSLPLYFLGGVYRETVQGLVDMKSLFQLLEERSDIGDKDTETKLPPLVLRGGSISFENVHFSYLPERKILDGISFEVPAGKSVAIVGSSGSGKSTILRMIFRFFDTDSGNVRIDGQDIKEVTLESLRSCIGVVPQDTVLFNDTIFHNIHYGNLSATEEEVYDAARRAVIHDTIMKFPDKYSTAVGERGLMLSGGEKQRVALARAFLKSPAILLCDEATNALDSKTEAEIMKTFRSLASNRTCIFIAHRLTTAMQCDEIIVMEKGKVVEKGTHQVLLEKSGRYAKLWTQQNSTLEV

SEQ ID NO: 34245 - protein, 677 aa, Arabidopsis thaliana
  misc_feature (1)..(677): Ceres Seq. ID no. 13605613
MRGSRFLLSRASLYHRLRSDHHHHSFSSFIKRSSIQRSPAINAFFTDPSPSPSPVNARVFFFSTSTSTPNQDQTKTASSKKILRTISSYLWMKDNPELRFRVIAALACLIGAKFLNVQVPFLFKLSIDLLSSYSSSTITDSNPYLLAAFATPSSVLIGYGIARSGSSAFNELRTAVFSKVSLRTIRSVSRKVLSHLHDLDLRYHLNRETGALNRIIDRGSRAINTILSAMVFNVVPTILEISMVTGILAYNFGPVFALITSLSVGSYIAFTLVVTQYRTKFRKAMNQADNDASTRAIDSLVNYETVKYFNNEDYEARKYDDLLGRYEDAALQTQKSLAFLDFGQSFIFSTALSTSMVLCSQGIMNGEMTVGDLVMVNGLLFQLSLPLYFLGGVYRETVQGLVDMKSLFQLLEERSDIGDKDTETKLPPLVLRGGSISFENVHFSYLPERKILDGISFEVPAGKSVAIVGSSGSGKSTILRMIFRFFDTDSGNVRIDGQDIKEVTLESLRSCIGVVPQDTVLFNDTIFHNIHYGNLSATEEEVYDAARRAVIHDTIMKFPDKYSTAVGERGLMLSGGEKQRVALARAFLKSPAILLCDEATNALDSKTEAEIMKTFRSLASNRTCIFIAHRLTTAMQCDEIIVMEKGKVVEKGTHQVLLEKSGRYAKLWTQQNSTLEV

SEQ ID NO: 34246 - protein, 586 aa, Arabidopsis thaliana
  misc_feature (1)..(586): Ceres Seq. ID no. 13605614
MKDNPELRFRVIAALACLIGAKFLNVQVPFLFKLSIDLLSSYSSSTITDSNPYLLAAFATPSSVLIGYGIARSGSSAFNELRTAVFSKVSLRTIRSVSRKVLSHLHDLDLRYHLNRETGALNRIIDRGSRAINTILSAMVFNVVPTILEISMVTGILAYNFGPVFALITSLSVGSYIAFTLVVTQYRTKFRKAMNQADNDASTRAIDSLVNYETVKYFNNEDYEARKYDDLLGRYEDAALQTQKSLAFLDFGQSFIFSTALSTSMVLCSQGIMNGEMTVGDLVMVNGLLFQLSLPLYFLGGVYRETVQGLVDMKSLFQLLEERSDIGDKDTETKLPPLVLRGGSISFENVHFSYLPERKILDGISFEVPAGKSVAIVGSSGSGKSTILRMIFRFFDTDSGNVRIDGQDIKEVTLESLRSCIGVVPQDTVLFNDTIFHNIHYGNLSATEEEVYDAARRAVIHDTIMKFPDKYSTAVGERGLMLSGGEKQRVALARAFLKSPAILLCDEATNALDSKTEAEIMKTFRSLASNRTCIFIAHRLTTAMQCDEIIVMEKGKVVEKGTHQVLLEKSGRYAKLWTQQNSTLEV

SEQ ID NO: 34247 - DNA, 1374 bp, Arabidopsis thaliana
  misc_feature (1)..(1374): Ceres Seq. ID no. 13605615
actctctcacactcgttgaccaaaaaaaaaactctctctttcactgagaaatgctctgcttcactcatgtcccacctcttcctctgttctccacctccggtatctatcttccggcctccagacgattcactaggattagaatgtcttcttcttcctccatcgattctgttcctcctccaccggataacgcaatcgtccttggttgtggtggaatcgctgtagatttcttagcgacggtggattcttatcctcaagctgacgacaagatccgaagcactagcctaaaggtgcaaggaggtggaaatgctgcaaatgcgttaacttgtgctgctcgtttgggattgaattcgagactgattagtaaggtagcgaatgactctcaaggaaaaggcatgttggaggagcttgaagctgatggtgtggatacttcttttattgtggtctctaaagagggtaattcaccatttacctatatcttagttgacaaccaaacgaaaacgcgtacttgtattcacacgcctggagacccacctatgttaccaactgacctttctcaatcgagtatgctatcagcgctagaccgagccagcattgtatactttgatgtaagattacacgaaacagctttggttattgcaaaagaggcaagtcgcaagaagatacctattttagttgatacagagaaaaaaagagatggtttagatgatctcttgccattcgccgactacgttgtctgtccagaaaatttccctcagacatggacagaagtgtcttcaactcctggtgcacttgtttccatgttgttgagattgcctaaactgaaatttgtgatcgtgacctcaggtgaacatgggtgcttaatggttcaaagagcttcaaaagaagtatttgaatctcaagagacagacattgaaagcttgttggagacactgaagcatagaaaagactcaacgacaacatttccaacatgtgtttcatcggagacaacaaagctgaaggccaacggggtaggaacaatgaccggaagattgtttctcggaacagcggagaaaattcctccagaagagcttgtagacaccactggtgctggcgatgcattcataggagctgttctatatgccatatgcgccggcatgcccccagagaaaatgttaccatttgctgctcaagtggctggttgcagctgccgggctttgggagctcgcacgggtcttcctcaccgtacagatcctagacttgtaccctttctggtttgacactctctgtgttcctttgtcaacctttctgagtcactactttactccattgcccactttcatatattttgaatgttcttctacttattagatgaaataaaagacatggtggtatgca

SEQ ID NO: 34248 - protein, 401 aa, Arabidopsis thaliana
  misc_feature (1)..(401): Ceres Seq. ID no. 13605616
MLCFTHVPPLPLFSTSGIYLPASRRFTRIRMSSSSSIDSVPPPPDNAIVLGCGGIAVDFLATVDSYPQADDKIRSTSLKVQGGGNAANALTCAARLGLNSRLISKVANDSQGKGMLEELEADGVDTSFIVVSKEGNSPFTYILVDNQTKTRTCIHTPGDPPMLPTDLSQSSMLSALDRASIVYFDVRLHETALVIAKEASRKKIPILVDTEKKRDGLDDLLPFADYVVCPENFPQTWTEVSSTPGALVSMLLRLPKLKFVIVTSGEHGCLMVQRASKEVFESQETDIESLLETLKHRKDSTTTFPTCVSSETTKLKANGVGTMTGRLFLGTAEKIPPEELVDTTGAGDAFIGAVLYAICAGMPPEKMLPFAAQVAGCSCRALGARTGLPHRTDPRLVPFLV

SEQ ID NO: 34249 - protein, 371 aa, Arabidopsis thaliana
  misc_feature (1)..(371): Ceres Seq. ID no. 13605617
MSSSSSIDSVPPPPDNAIVLGCGGIAVDFLATVDSYPQADDKIRSTSLKVQGGGNAANALTCAARLGLNSRLISKVANDSQGKGMLEELEADGVDTSFIVVSKEGNSPFTYILVDNQTKTRTCIHTPGDPPMLPTDLSQSSMLSALDRASIVYFDVRLHETALVIAKEASRKKIPILVDTEKKRDGLDDLLPFADYVVCPENFPQTWTEVSSTPGALVSMLLRLPKLKFVIVTSGEHGCLMVQRASKEVFESQETDIESLLETLKHRKDSTTTFPTCVSSETTKLKANGVGTMTGRLFLGTAEKIPPEELVDTTGAGDAFIGAVLYAICAGMPPEKMLPFAAQVAGCSCRALGARTGLPHRTDPRLVPFLV

SEQ ID NO: 34250 - protein, 287 aa, Arabidopsis thaliana
  misc_feature (1)..(287): Ceres Seq. ID no. 13605618
MLEELEADGVDTSFIVVSKEGNSPFTYILVDNQTKTRTCIHTPGDPPMLPTDLSQSSMLSALDRASIVYFDVRLHETALVIAKEASRKKIPILVDTEKKRDGLDDLLPFADYVVCPENFPQTWTEVSSTPGALVSMLLRLPKLKFVIVTSGEHGCLMVQRASKEVFESQETDIESLLETLKHRKDSTTTFPTCVSSETTKLKANGVGTMTGRLFLGTAEKIPPEELVDTTGAGDAFIGAVLYAICAGMPPEKMLPFAAQVAGCSCRALGARTGLPHRTDPRLVPFLV

SEQ ID NO: 34251 - DNA, 785 bp, Arabidopsis thaliana
  misc_feature (1)..(785): Ceres Seq. ID no. 13605623
ataattagccctcatcactcaatttctcaatctcagattataattccacaaacgaacaagaagaagaagaagaacacaagataacaatggagagtaacaacaacgagaagaagaaagttgcaagacaatcatcatccttcagactacgtagcccaagcctaaacgcacttcgtctccaacgaatcttcgacttattcgacaaaaacggcgacggattcataaccgtcgaagagctaagccaagctctaacacgtcttggtctcaacgctgatctctccgatctcaaatccaccgttgaatcatacatccaacctggtaacactggtctcaatttcgatgatttctcttctcttcacaaaacactcgacgattctttcttcggtggagcttgtggaggaggagaaaacgaagatgatccttcttccgcagctgaaaatgaatcggatctcgccgaggcgtttaaggtgtttgatgagaacggtgatggattcatctccgctagagaactgcaaactgttctgaagaaacttggtttacctgaaggtggagaaatggagagagtggagaagatgatcgtttccgttgaccggaatcaagatggtcgcgttgacttttttgaattcaagaacatgatgcgtactgttgtcatcccttcttcttgattctccaaaaaaaacattttttctccaaaagattattatttttactttttgtcttttaagtttgtattttttccagtttatgtaatgattgattcaaacattataaacaaataaattttttct

SEQ ID NO: 34252 - protein, 191 aa, Arabidopsis thaliana
  misc_feature (1)..(191): Ceres Seq. ID no. 13605624
MESNNNEKKKVARQSSSFRLRSPSLNALRLQRIFDLFDKNGDGFITVEELSQALTRLGLNADLSDLKSTVESYIQPGNTGLNFDDFSSLHKTLDDSFFGGACGGGENEDDPSSAAENESDLAEAFKVFDENGDGFISARELQTVLKKLGLPEGGEMERVEKMIVSVDRNQDGRVDFFEFKNMMRTVVIPSS

SEQ ID NO: 34253 - DNA, 2983 bp, Arabidopsis thaliana
  misc_feature (1)..(2983): Ceres Seq. ID no. 13605633
atatattattgacagaaataaaatcggttacgtaaggttcacacattacacaaaacatgtccgatatctccaatggaaataaactctcatacttttctcaagaaagagtgaaaaacaaaaaacttggtttagagaaatgagaggtttaccaaatttctaccattcttacaccttcttcttcttcttcctcttaattctgttccctgcttactctatctctgccaacactttgtcggcttcagaatctctaactatctcaagcaataacaccattgtgtctcctggtaatgtcttcgagcttggtttcttcaaacccggtttagattctcgttggtatcttggaatttggtacaaggcaatctctaagagaacctacgtatgggttgcaaacagagacactcctctctctagttccatcggaactctcaaaatctccgacagtaatcttgtcgttttggatcagtccgatacaccggtttggtcgacgaatctgaccggaggagatgtgagatctccattggtggcagagcttcttgataatggtaattttgtgctcagagactccaagaacagcgctccagatggagttttgtggcagagttttgattttccgacagatactttacttccggagatgaaacttggctgggatgccaaaaccgggttcaacagattcattagatcatggaaatctccagatgatccatcaagtggagatttctcgttcaaactcgaaaccgaaggcttccctgagatttttctatggaacagagaatcacgaatgtaccggagtggtccatggaatggaatccggtttagtggtgtaccggagatgcaaccatttgaatacatggttttcaatttcactacgagtaaagaagaagtgacttactcatttagaatcactaaaagcgacgtttactcgagattaagcataagctcctcaggattgttacaaagattcacttggattgagacagcacagaattggaaccaattctggtacgcaccaaaagaccaatgtgatgagtacaaagagtgtggtgtttacggttattgcgactcgaacacttcacctgtttgtaattgtattaaagggtttaagccgaggaatcctcaagtgtggggattgagagacgggtcggatggttgcgtgaggaagacgctactgagctgtggtggcggagatgggtttgtgcggttgaagaaaatgaaattgccggatactaccacggctagtgtggacagaggaattggtgtgaaagaatgtgaacagaagtgtttaagagattgtaattgcacggcgtttgcgaatacggatatccggggtagcgggtcgggttgtgtgacttggaccggagagctttttgatatcaggaattatgccaaaggtggtcaagatctttacgttagattggctgctactgatctcgaggacaaaagaaacagaagtgcaaaaatcataggttcgagtattggagtgagcgttttgcttcttttaagtttcattatcttcttcttgtggaaaaggaagcagaagcgatcaatactaatcgaaacacctattgttgatcatcaactgagaagccgagatttgctaatgaacgaagttgtaatatcaagtaggagacacatatctagagaaaacaatacagacgatctcgaattgccattgatggagtttgaagaagttgccatggccacaaacaatttttctaacgccaacaagctaggacaaggtggttttggtatagtttataagggaaagttacttgatggtcaagaaatggcagtgaagagactatcaaagacatcagttcaggggactgatgagttcaagaatgaggtaaagttgattgcaaggcttcagcacataaaccttgttaggcttcttgcatgttgcgtcgatgcgggtgagaagatgttgatttacgagtacttggaaaatctaagcctcgactctcatctatttgacaaatcccgaaactctaagctaaattggcaaatgagatttgatatcatcaatggtattgctcgaggacttctatatcttcaccaagattcacggtttagaattatccatagagacttgaaagcaagtaacatcttgcttgataaatatatgactccaaagatctcggatttcggaatggctaggatctttggacgggatgagacagaagctaatacgaggaaggtggttggaacctacggttatatgtctcctgaatatgcaatggacgggatattctcgatgaagtcagatgttttcagttttggggtcttgcttcttgagattataagtagcaagaggaacaaaggattctacaattcggaccgtgaccttaaccttctcggttgtgtgtggaggaattggaaagaaggaaaagggctagagatcatagatccaatcatcacagattcttcatcaacattcaggcaacatgaaatcttaagatgcatacaaattggcctcttgtgtgttcaagaacgtgcagaggacagaccaactatgtccttggtaattttgatgctcggaagcgaatcaacaactattcctcaacctaaagcgcccggttattgcctggagagaagtcttcttgacactgattcttcgtcgagtaaacagcgcgacgatgaatcatggacagtgaaccaaattactgtctcggtccttgatgctcggtaatgtgactgtcaactagccaatcttctatactaagatgactaaattgagcgacaataagaatcaactaggaaagatggtattagttatgtgcatagtattttctctgtacgtctccgttgcaaaggttactacatgattcaattgtcttaattaagcatgtattctgtaattgctttatggataacccaaatagtcctgcagttataggacatcaatgtgatattttgaaagattctcagactttcatattataaattatggctactagaagaggcaaatattgttggttagtag

SEQ ID NO: 34254 - protein, 850 aa, Arabidopsis thaliana
  misc_feature (1)..(850): Ceres Seq. ID no. 13605634
MRGLPNFYHSYTFFFFFLLILFPAYSISANTLSASESLTISSNNTIVSPGNVFELGFFKPGLDSRWYLGIWYKAISKRTYVWVANRDTPLSSSIGTLKISDSNLVVLDQSDTPVWSTNLTGGDVRSPLVAELLDNGNFVLRDSKNSAPDGVLWQSFDFPTDTLLPEMKLGWDAKTGFNRFIRSWKSPDDPSSGDFSFKLETEGFPEIFLWNRESRMYRSGPWNGIRFSGVPEMQPFEYMVFNFTTSKEEVTYSFRITKSDVYSRLSISSSGLLQRFTWIETAQNWNQFWYAPKDQCDEYKECGVYGYCDSNTSPVCNCIKGFKPRNPQVWGLRDGSDGCVRKTLLSCGGGDGFVRLKKMKLPDTTTASVDRGIGVKECEQKCLRDCNCTAFANTDIRGSGSGCVTWTGELFDIRNYAKGGQDLYVRLAATDLEDKRNRSAKIIGSSIGVSVLLLLSFIIFFLWKRKQKRSILIETPIVDHQLRSRDLLMNEVVISSRRHISRENNTDDLELPLMEFEEVAMATNNFSNANKLGQGGFGIVYKGKLLDGQEMAVKRLSKTSVQGTDEFKNEVKLIARLQHINLVRLLACCVDAGEKMLIYEYLENLSLDSHLFDKSRNSKLNWQMRFDIINGIARGLLYLHQDSRFRIIHRDLKASNILLDKYMTPKISDFGMARIFGRDETEANTRKVVGTYGYMSPEYAMDGIFSMKSDVFSFGVLLLEIISSKRNKGFYNSDRDLNLLGCVWRNWKEGKGLEIIDPIITDSSSTFRQHEILRCIQIGLLCVQERAEDRPTMSLVILMLGSESTTIPQPKAPGYCLERSLLDTDSSSSKQRDDESWTVNQITVSVLDAR

SEQ ID NO: 34255 - protein, 684 aa, Arabidopsis thaliana
  misc_feature (1)..(684): Ceres Seq. ID no. 13605635
MKLGWDAKTGFNRFIRSWKSPDDPSSGDFSFKLETEGFPEIFLWNRESRMYRSGPWNGIRFSGVPEMQPFEYMVFNFTTSKEEVTYSFRITKSDVYSRLSISSSGLLQRFTWIETAQNWNQFWYAPKDQCDEYKECGVYGYCDSNTSPVCNCIKGFKPRNPQVWGLRDGSDGCVRKTLLSCGGGDGFVRLKKMKLPDTTTASVDRGIGVKECEQKCLRDCNCTAFANTDIRGSGSGCVTWTGELFDIRNYAKGGQDLYVRLAATDLEDKRNRSAKIIGSSIGVSVLLLLSFIIFFLWKRKQKRSILIETPIVDHQLRSRDLLMNEVVISSRRHISRENNTDDLELPLMEFEEVAMATNNFSNANKLGQGGFGIVYKGKLLDGQEMAVKRLSKTSVQGTDEFKNEVKLIARLQHINLVRLLACCVDAGEKMLIYEYLENLSLDSHLFDKSRNSKLNWQMRFDIINGIARGLLYLHQDSRFRIIHRDLKASNILLDKYMTPKISDFGMARIFGRDETEANTRKVVGTYGYMSPEYAMDGIFSMKSDVFSFGVLLLEIISSKRNKGFYNSDRDLNLLGCVWRNWKEGKGLEIIDPIITDSSSTFRQHEILRCIQIGLLCVQERAEDRPTMSLVILMLGSESTTIPQPKAPGYCLERSLLDTDSSSSKQRDDESWTVNQITVSVLDAR

SEQ ID NO: 34256 - protein, 635 aa, Arabidopsis thaliana
  misc_feature (1)..(635): Ceres Seq. ID no. 13605636
MYRSGPWNGIRFSGVPEMQPFEYMVFNFTTSKEEVTYSFRITKSDVYSRLSISSSGLLQRFTWIETAQNWNQFWYAPKDQCDEYKECGVYGYCDSNTSPVCNCIKGFKPRNPQVWGLRDGSDGCVRKTLLSCGGGDGFVRLKKMKLPDTTTASVDRGIGVKECEQKCLRDCNCTAFANTDIRGSGSGCVTWTGELFDIRNYAKGGQDLYVRLAATDLEDKRNRSAKIIGSSIGVSVLLLLSFIIFFLWKRKQKRSILIETPIVDHQLRSRDLLMNEVVISSRRHISRENNTDDLELPLMEFEEVAMATNNFSNANKLGQGGFGIVYKGKLLDGQEMAVKRLSKTSVQGTDEFKNEVKLIARLQHINLVRLLACCVDAGEKMLIYEYLENLSLDSHLFDKSRNSKLNWQMRFDIINGIARGLLYLHQDSRFRIIHRDLKASNILLDKYMTPKISDFGMARIFGRDETEANTRKVVGTYGYMSPEYAMDGIFSMKSDVFSFGVLLLEIISSKRNKGFYNSDRDLNLLGCVWRNWKEGKGLEIIDPIITDSSSTFRQHEILRCIQIGLLCVQERAEDRPTMSLVILMLGSESTTIPQPKAPGYCLERSLLDTDSSSSKQRDDESWTVNQITVSVLDAR

SEQ ID NO: 34257 - DNA, 1796 bp, Arabidopsis thaliana
  misc_feature (1)..(1796): Ceres Seq. ID no. 13605637
gaatctttgactatcttcttcgccggaaccgatgaatatactgagacgaattccggcgaatttgattgcgagcagatattactacactaacagagtaaaaaagacgacactttactcaaaaatcagtcctttaggagacccaaaatcaagtgtttacccagaactccaaaactgggttcaatgcggtaaaaaagtctctgttgctgaacttattcgcatcgttcacgatcttcgtagacgcaaacgcttcctccacgctctcgaggtttcgaaatggatgaatgagactggtgtatgtgtgttctctccgacagaacacgcggttcatcttgatcttattggtagagtttatggatttgtcactgcagaagagtattttgagaatcttaaggaacagtataagaatgataagacttatggagctcttttgaattgttacgttaggcaacagaatgttgagaagtctctgttgcattttgagaagatgaaggagatgggttttgttacttcgtctcttacttacaataacattatgtgtctttacacgaatattggtcagcacgagaaagttcctaaggttttggaggagatgaaggaagagaatgttgctccggataactatagttataggatatgtattaatgcttttggtgctatgtatgatcttgagaggattggtgggaccttgagagatatggagagacgacaggatattactatggattggaacacttatgcggttgcggctaagttttatattgatggtggtgattgtgatagagcggttgagcttttgaagatgtcggagaatagattggagaagaaagatggtgaaggttacaatcatctcattacgctttatgctaggttagggaagaagatagaggttttaaggttatgggatttggagaaagatgtgtgtaaaaggagaataaatcaggactatcttactgtgttgcagtcgcttgtgaagattgatgctttagttgaggctgaggaagtacttacggaatggaaatcatcggggaactgttatgattttcgagtgcctaacactgtgattcgtggttacattggaaaaagtatggaggagaaggcagaagcgatgcttgaagatttagcaagaagagggaaagctactacaccagaatcttgggaacttgtggctactgcttatgcggaaaagggtactttagaaaatgctttcaagtgtatgaaaactgccttaggtgtagaagtgggtagcagaaaatggagacctggattgacgctggttacaagtgttttgagttgggtcggggatgaaggaagtttgaaagaagtagaaagctttgttgcatctcttaggaattgtatcggtgtgaacaaacagatgtatcatgctcttgtcaaggctgatataagagaaggcggacgtaacattgatactctgttgcagcgtatgaaagatgacaaaattgaaatcgatgaagaaaccacagtgattctcagcacaagaagtccatgctaaaagtttcttattcttccttgacgtgatgataccaaagatgtcttctgagacaaggatttaggaatgtgatttcttaacggttgagtcttccttcagcaatacttattagtaccaaatgtaccaaaattttattttgttaagaacactctctagactctgttttcatagcatctatagaacagtctacaagagaatcctctgttcttttttcaaatgcagtgtactatcatattgaatcagcagaaggcaaagttagagctttggcaatttggttccatttttattg

SEQ ID NO: 34258 - protein, 492 aa, Arabidopsis thaliana
  misc_feature (1)..(492): Ceres Seq. ID no. 13605638
MNILRRIPANLIASRYYYTNRVKKTTLYSKISPLGDPKSSVYPELQNWVQCGKKVSVAELIRIVHDLRRRKRFLHALEVSKWMNETGVCVFSPTEHAVHLDLIGRVYGFVTAEEYFENLKEQYKNDKTYGALLNCYVRQQNVEKSLLHFEKMKEMGFVTSSLTYNNIMCLYTNIGQHEKVPKVLEEMKEENVAPDNYSYRICINAFGAMYDLERIGGTLRDMERRQDITMDWNTYAVAAKFYIDGGDCDRAVELLKMSENRLEKKDGEGYNHLITLYARLGKKIEVLRLWDLEKDVCKRRINQDYLTVLQSLVKIDALVEAEEVLTEWKSSGNCYDFRVPNTVIRGYIGKSMEEKAEAMLEDLARRGKATTPESWELVATAYAEKGTLENAFKCMKTALGVEVGSRKWRPGLTLVTSVLSWVGDEGSLKEVESFVASLRNCIGVNKQMYHALVKADIREGGRNIDTLLQRMKDDKIEIDEETTVILSTRSPC

SEQ ID NO: 34259 - protein, 410 aa, Arabidopsis thaliana
  misc_feature (1)..(410): Ceres Seq. ID no. 13605639
MNETGVCVFSPTEHAVHLDLIGRVYGFVTAEEYFENLKEQYKNDKTYGALLNCYVRQQNVEKSLLHFEKMKEMGFVTSSLTYNNIMCLYTNIGQHEKVPKVLEEMKEENVAPDNYSYRICINAFGAMYDLERIGGTLRDMERRQDITMDWNTYAVAAKFYIDGGDCDRAVELLKMSENRLEKKDGEGYNHLITLYARLGKKIEVLRLWDLEKDVCKRRINQDYLTVLQSLVKIDALVEAEEVLTEWKSSGNCYDFRVPNTVIRGYIGKSMEEKAEAMLEDLARRGKATTPESWELVATAYAEKGTLENAFKCMKTALGVEVGSRKWRPGLTLVTSVLSWVGDEGSLKEVESFVASLRNCIGVNKQMYHALVKADIREGGRNIDTLLQRMKDDKIEIDEETTVILSTRSPC

SEQ ID NO: 34260 - protein, 341 aa, Arabidopsis thaliana
  misc_feature (1)..(341): Ceres Seq. ID no. 13605640
MKEMGFVTSSLTYNNIMCLYTNIGQHEKVPKVLEEMKEENVAPDNYSYRICINAFGAMYDLERIGGTLRDMERRQDITMDWNTYAVAAKFYIDGGDCDRAVELLKMSENRLEKKDGEGYNHLITLYARLGKKIEVLRLWDLEKDVCKRRINQDYLTVLQSLVKIDALVEAEEVLTEWKSSGNCYDFRVPNTVIRGYIGKSMEEKAEAMLEDLARRGKATTPESWELVATAYAEKGTLENAFKCMKTALGVEVGSRKWRPGLTLVTSVLSWVGDEGSLKEVESFVASLRNCIGVNKQMYHALVKADIREGGRNIDTLLQRMKDDKIEIDEETTVILSTRSPC

SEQ ID NO: 34261 - DNA, 1277 bp, Arabidopsis thaliana
  misc_feature (1)..(1277): Ceres Seq. ID no. 13605667
acttttcttttcctcatcataaaaaacattctcagagcaaatttcaagtttatttcattcaatttcgatccgagtaaccatggagtgtagatcattggatctgacgattatatctgcggaggatctcaaagacgttcaattgatcggtaaacaagacttgtacgccgtcgtttccatcaacggcgacgctaggacgaagcagaagacaaaggttgataaagattgcggcaccaaacctaaatggaagcatcaaatgaagctcaccgtcgatgacgcagcggcgcgtgacaatcgtcttactcttgttttcgagatcgtggcggatcgtcccatcgctggtgataaacctgtcggtgaggttagcgttccggtgaaggagcttttggatcagaataaaggtgacgaggagaaaacggttacttacgccgtgaggttgcctaacgggaaggcgaaaggatctctcaaattctcgttcaaatttggggaaaagtatacttatggatcttcgagtggtcctcacgcgccggtcccttcggctatggatcataagactatggatcagcccgtcaccgcttacccgcccggacacggtgcaccgtctgcataccctgctcctcccgcgggtccttcttccggatatccaccacaaggacatgacgataagcacgatggtgtttatggatacccgcagcaggctggatatccagctggaaccggtggttatccgccacctggtgcatacccacaacagggaggttaccctggatatccgcctcagcaacagggtggatacccgggttatccgccacagggtccatatggttacccgcaacaaggttatccaccacagggtccatacggttacccgcaacagcaagctcatggtaaaccgcagaaaccgaagaagcatggtaaggctggagctggaatgggactaggacttgggcttggagctggtttattgggtgggttgttggttggtgaagcggtttctgacatcgctgatatgggtgacatgggtgacatgggtgacatgggtggtttcgatttctgattgctgtgttatcaagttttaatttcttaggataattgctctaatgtttttcgtttgatgaatcatgtgaagaacgtgagagatcaagttttatcttgtgtttatgtctccggttacttattttcttctaatgaatgtaacattatgatatttccaatctctggctgttgaatagaatgcaatgaaacattggaaatatagtgttgactttgtcacctttatt

SEQ ID NO: 34262 - protein, 324 aa, Arabidopsis thaliana
  misc_feature (1)..(324): Ceres Seq. ID no. 13605668
MECRSLDLTIISAEDLKDVQLIGKQDLYAVVSINGDARTKQKTKVDKDCGTKPKWKHQMKLTVDDAAARDNRLTLVFEIVADRPIAGDKPVGEVSVPVKELLDQNKGDEEKTVTYAVRLPNGKAKGSLKFSFKFGEKYTYGSSSGPHAPVPSAMDHKTMDQPVTAYPPGHGAPSAYPAPPAGPSSGYPPQGHDDKHDGVYGYPQQAGYPAGTGGYPPPGAYPQQGGYPGYPPQQQGGYPGYPPQGPYGYPQQGYPPQGPYGYPQQQAHGKPQKPKKHGKAGAGMGLGLGLGAGLLGGLLVGEAVSDIADMGDMGDMGDMGGFDF

SEQ ID NO: 34263 - protein, 266 aa, Arabidopsis thaliana
  misc_feature (1)..(266): Ceres Seq. ID no. 13605669
MKLTVDDAAARDNRLTLVFEIVADRPIAGDKPVGEVSVPVKELLDQNKGDEEKTVTYAVRLPNGKAKGSLKFSFKFGEKYTYGSSSGPHAPVPSAMDHKTMDQPVTAYPPGHGAPSAYPAPPAGPSSGYPPQGHDDKHDGVYGYPQQAGYPAGTGGYPPPGAYPQQGGYPGYPPQQQGGYPGYPPQGPYGYPQQGYPPQGPYGYPQQQAHGKPQKPKKHGKAGAGMGLGLGLGAGLLGGLLVGEAVSDIADMGDMGDMGDMGGFDF

SEQ ID NO: 34264 - protein, 171 aa, Arabidopsis thaliana
  misc_feature (1)..(171): Ceres Seq. ID no. 13605670
MDHKTMDQPVTAYPPGHGAPSAYPAPPAGPSSGYPPQGHDDKHDGVYGYPQQAGYPAGTGGYPPPGAYPQQGGYPGYPPQQQGGYPGYPPQGPYGYPQQGYPPQGPYGYPQQQAHGKPQKPKKHGKAGAGMGLGLGLGAGLLGGLLVGEAVSDIADMGDMGDMGDMGGFDF

SEQ ID NO: 34265 - DNA, 2115 bp, Arabidopsis thaliana
  misc_feature (1)..(2115): Ceres Seq. ID no. 13605671
acaaacgagatcgaagaagagttctcaacaacgaaaaatgatttttatcaaggaaaacacagcgaagatgacgaggaacaaagctattgcgtgtttggtttttctgactgtgcttgattttttaatgaatattggagcagctttgatgtcaagtttggcaatagaaggcgaagagcagaaactggggacggtgatagggatcgatctagggactacatattcatgtgttggtgtctatcataacaaacatgtggaaatcatagcaaacgatcaaggaaacagaattacaccatcttgggttgcatttactgataccgaacgtctcatcggggaagctgctaagaatcaagcagccaagaacccggagcgaaccatcttcgacccgaaacgtctgattggaagaaaatttgatgatcctgatgtacaaagggatatcaaattcttgccatacaaggttgtgaacaaagatgggaagccttacattcaagtgaaggttaaaggtgaagagaaattgtttagccctgaggaaataagtgctatgatactaaccaagatgaaagaaacagctgaagctttcttgggaaagaagattaaagatgctgtgatcacggttccagcgtatttcaatgatgcgcagaggcaagccacaaaggatgcaggggcaatcgcggggcttaacgtggttcgtataatcaatgagccaacgggtgctgccatagcttatggtttagacaaaaaaggtggggagtcaaacattctcgtatatgatcttggtggtggaacattcgatgttagtatccttaccatagacaatggagtctttgaagtcttatccacaagtggagacactcaccttggtggagaagattttgaccacagagtgatggactatttcatcaaacttgtcaagaagaagtataacaaagacattagcaaggatcacaaagcccttggtaaacttaggcgtgaatgtgagcttgcgaaacgatctttgagcaaccagcaccaagtccgtgttgagattgagtcgctctttgatggagttgatttctctgagcctttaacgagagcaagattcgaggaactcaacatggatttgttcaagaagactatggagccagtgaagaaggctcttaaagatgcgggtttgaagaaatctgatatcgacgagattgttcttgttggaggaagcactcgaatcccaaaagttcagcagatgttaaaggatttcttcgacggcaaggaacccagcaaagggactaaccctgatgaggctgtggcctatggcgccgcggtccaaggtggagtattaagtggtgaaggtggagaagaaacacaaaatattctactgcttgatgttgcgcctttgagtctcggtattgaaactgtcggaggcgtgatgacaaacattattccgaggaacacggtgatcccaacgaagaagtctcaggtgttcactacttaccaagatcagcaaactactgtgactatcaacgtctacgaaggcgagagaagcatgacgaaagataaccgcgagcttggaaaattcgatctcacaggcattcttcctgcacccaggggagtgccacagattgaggtgactttcgaagtggacgcaaatgggatcctgcaggtgaaagctgaagacaaagttgctaagacgtcacaatcgattacaataacgaacgataaaggtcgtttgacagaagaagagattgaggaaatgatcagagaagcagaggagtttgctgaggaagataagattatgaaggagaagattgatgcgaggaacaagcttgaaacgtatgtgtacaacatgaaaagtacagtggccgataaggagaagcttgcgaagaagataagtgatgaagataaagagaagatggaaggggttttgaaggaggctttggagtggttagaagagaatgtgaatgcagagaaggaagattatgatgagaaactgaaggaggtggagttggtttgtgacccggttattaagtcggtttacgagaaaaccgagggagagaatgaggacacgatggagatgatcacgatgagttatagaatcgtataattgaaggtcttttgagtcggttagctataggatttgcagct

SEQ ID NO: 34266 - protein, 690 aa, Arabidopsis thaliana
  misc_feature (1)..(690): Ceres Seq. ID no. 13605672
QTRSKKSSQQRKMIFIKENTAKMTRNKAIACLVFLTVLDFLMNIGAALMSSLAIEGEEQKLGTVIGIDLGTTYSCVGVYHNKHVEIIANDQGNRITPSWVAFTDTERLIGEAAKNQAAKNPERTIFDPKRLIGRKFDDPDVQRDIKFLPYKVVNKDGKPYIQVKVKGEEKLFSPEEISAMILTKMKETAEAFLGKKIKDAVITVPAYFNDAQRQATKDAGAIAGLNVVRIINEPTGAAIAYGLDKKGGESNILVYDLGGGTFDVSILTIDNGVFEVLSTSGDTHLGGEDFDHRVMDYFIKLVKKKYNKDISKDHKALGKLRRECELAKRSLSNQHQVRVEIESLFDGVDFSEPLTRARFEELNMDLFKKTMEPVKKALKDAGLKKSDIDEIVLVGGSTRIPKVQQMLKDFFDGKEPSKGTNPDEAVAYGAAVQGGVLSGEGGEETQNILLLDVAPLSLGIETVGGVMTNIIPRNTVIPTKKSQVFTTYQDQQTTVTINVYEGERSMTKDNRELGKFDLTGILPAPRGVPQIEVTFEVDANGILQVKAEDKVAKTSQSITITNDKGRLTEEEIEEMIREAEEFAEEDKIMKEKIDARNKLETYVYNMKSTVADKEKLAKKISDEDKEKMEGVLKEALEWLEENVNAEKEDYDEKLKEVELVCDPVIKSVYEKTEGENEDTMEMITMSYRIV

SEQ ID NO: 34267 - protein, 678 aa, Arabidopsis thaliana
  misc_feature (1)..(678): Ceres Seq. ID no. 13605673
MIFIKENTAKMTRNKAIACLVFLTVLDFLMNIGAALMSSLAIEGEEQKLGTVIGIDLGTTYSCVGVYHNKHVEIIANDQGNRITPSWVAFTDTERLIGEAAKNQAAKNPERTIFDPKRLIGRKFDDPDVQRDIKFLPYKVVNKDGKPYIQVKVKGEEKLFSPEEISAMILTKMKETAEAFLGKKIKDAVITVPAYFNDAQRQATKDAGAIAGLNVVRIINEPTGAAIAYGLDKKGGESNILVYDLGGGTFDVSILTIDNGVFEVLSTSGDTHLGGEDFDHRVMDYFIKLVKKKYNKDISKDHKALGKLRRECELAKRSLSNQHQVRVEIESLFDGVDFSEPLTRARFEELNMDLFKKTMEPVKKALKDAGLKKSDIDEIVLVGGSTRIPKVQQMLKDFFDGKEPSKGTNPDEAVAYGAAVQGGVLSGEGGEETQNILLLDVAPLSLGIETVGGVMTNIIPRNTVIPTKKSQVFTTYQDQQTTVTINVYEGERSMTKDNRELGKFDLTGILPAPRGVPQIEVTFEVDANGILQVKAEDKVAKTSQSITITNDKGRLTEEEIEEMIREAEEFAEEDKIMKEKIDARNKLETYVYNMKSTVADKEKLAKKISDEDKEKMEGVLKEALEWLEENVNAEKEDYDEKLKEVELVCDPVIKSVYEKTEGENEDTMEMITMSYRIV

SEQ ID NO: 34268 - protein, 668 aa, Arabidopsis thaliana
  misc_feature (1)..(668): Ceres Seq. ID no. 13605674
MTRNKAIACLVFLTVLDFLMNIGAALMSSLAIEGEEQKLGTVIGIDLGTTYSCVGVYHNKHVEIIANDQGNRITPSWVAFTDTERLIGEAAKNQAAKNPERTIFDPKRLIGRKFDDPDVQRDIKFLPYKVVNKDGKPYIQVKVKGEEKLFSPEEISAMILTKMKETAEAFLGKKIKDAVITVPAYFNDAQRQATKDAGAIAGLNVVRIINEPTGAAIAYGLDKKGGESNILVYDLGGGTFDVSILTIDNGVFEVLSTSGDTHLGGEDFDHRVMDYFIKLVKKKYNKDISKDHKALGKLRRECELAKRSLSNQHQVRVEIESLFDGVDFSEPLTRARFEELNMDLFKKTMEPVKKALKDAGLKKSDIDEIVLVGGSTRIPKVQQMLKDFFDGKEPSKGTNPDEAVAYGAAVQGGVLSGEGGEETQNILLLDVAPLSLGIETVGGVMTNIIPRNTVIPTKKSQVFTTYQDQQTTVTINVYEGERSMTKDNRELGKFDLTGILPAPRGVPQIEVTFEVDANGILQVKAEDKVAKTSQSITITNDKGRLTEEEIEEMIREAEEFAEEDKIMKEKIDARNKLETYVYNMKSTVADKEKLAKKISDEDKEKMEGVLKEALEWLEENVNAEKEDYDEKLKEVELVCDPVIKSVYEKTEGENEDTMEMITMSYRIV

SEQ ID NO: 34269 - DNA, 1139 bp, Arabidopsis thaliana
  misc_feature (1)..(1139): Ceres Seq. ID no. 13605679
atgaaaaacttcaatcttactcacagaatcgttatggcgccaatggcgagaatgagatcatacggtaacattccacaacctcacgtcgccttgtattattgtcaaagaacaactccgggaggtcttctcatcagtgaagccaccggagtttctgaaaccgccatggcgtatcaaaacatgccagggatatggaggaaagaacaaatcgaagcatggaagcccatcgttgacgctgttcactctcacggcggcatcttcttctgccagctctggcacgctggtcgcgtttctcatcaagattgtcagccaaatggagaatctccggtctcttcaacagataagccattcgccgatgatccatcgaatgagtttacacctccgagaaggttaagaactgacgaaatcccgacaattatcaatgattttcgtctcgctgcaagaaacgcaaccgaagctggttttgatggagtagagatccatggagctcacgggtacttgattgaccagtttatgaaagactctgttaacgatcgaaccgatagttacggcggatctctagagaatcgatgtagattcgctttacaagtaatcgaagcggtttcgaaagagatcggacctgatcgtgtcggaatcagactctcaccgttcgctgattacatggaatccggagatacagatccaaaaagattagggctttacatggccaagtctctcaacagattcgagatactctactgccacatgattgagcctaggatgaaaaccgtcagtgagattttcgagtgcagggaatcacttacgccgatgagaaatgcgtttaatggaacgttcattgtcgccggaggttatacaagagaagacggaaacaaggcggtggcagagggaagaacagatcttgtagcgtacggaagattgttcttagctaatcctgatttgcctaaaaggtttgagctcaatgctccgctgaataagtaagacagaccaagtttctacagttctgatcctgttgctggttacactgattacccttttctcgataccacagatcaataagacaagagtcttgttcaatctcttttcgcttcaattgttatgtctactcaagaccattaagaaaatcaattgtgaccggtttttat

SEQ ID NO: 34270 - protein, 324 aa, Arabidopsis thaliana
  misc_feature (1)..(324): Ceres Seq. ID no. 13605680
MKNFNLTHRIVMAPMARMRSYGNIPQPHVALYYCQRTTPGGLLISEATGVSETAMAYQNMPGIWRKEQIEAWKPIVDAVHSHGGIFFCQLWHAGRVSHQDCQPNGESPVSSTDKPFADDPSNEFTPPRRLRTDEIPTIINDFRLAARNATEAGFDGVEIHGAHGYLIDQFMKDSVNDRTDSYGGSLENRCRFALQVIEAVSKEIGPDRVGIRLSPFADYMESGDTDPKRLGLYMAKSLNRFEILYCHMIEPRMKTVSEIFECRESLTPMRNAFNGTFIVAGGYTREDGNKAVAEGRTDLVAYGRLFLANPDLPKRFELNAPLNK

SEQ ID NO: 34271 - protein, 313 aa, Arabidopsis thaliana
  misc_feature (1)..(313): Ceres Seq. ID no. 13605681
MAPMARMRSYGNIPQPHVALYYCQRTTPGGLLISEATGVSETAMAYQNMPGIWRKEQIEAWKPIVDAVHSHGGIFFCQLWHAGRVSHQDCQPNGESPVSSTDKPFADDPSNEFTPPRRLRTDEIPTIINDFRLAARNATEAGFDGVEIHGAHGYLIDQFMKDSVNDRTDSYGGSLENRCRFALQVIEAVSKEIGPDRVGIRLSPFADYMESGDTDPKRLGLYMAKSLNRFEILYCHMIEPRMKTVSEIFECRESLTPMRNAFNGTFIVAGGYTREDGNKAVAEGRTDLVAYGRLFLANPDLPKRFELNAPLNK

SEQ ID NO: 34272 - protein, 310 aa, Arabidopsis thaliana
  misc_feature (1)..(310): Ceres Seq. ID no. 13605682
MARMRSYGNIPQPHVALYYCQRTTPGGLLISEATGVSETAMAYQNMPGIWRKEQIEAWKPIVDAVHSHGGIFFCQLWHAGRVSHQDCQPNGESPVSSTDKPFADDPSNEFTPPRRLRTDEIPTIINDFRLAARNATEAGFDGVEIHGAHGYLIDQFMKDSVNDRTDSYGGSLENRCRFALQVIEAVSKEIGPDRVGIRLSPFADYMESGDTDPKRLGLYMAKSLNRFEILYCHMIEPRMKTVSEIFECRESLTPMRNAFNGTFIVAGGYTREDGNKAVAEGRTDLVAYGRLFLANPDLPKRFELNAPLNK

SEQ ID NO: 34273 - DNA, 1421 bp, Arabidopsis thaliana
  misc_feature (1)..(1421): Ceres Seq. ID no. 13605684
atggagttagaaaaagttcacgtggttttgttcccatacttgtccaaagggcacatgattcctatgctccaattagctcgtctcctcttatcccactccttcgccggagacatctccgtcaccgtcttcaccactcctttgaaccgtcctttcatcgttgactcactctccggcaccaaagcgaccatcgtcgacgtacctttccctgataacgtcccggagatcccacccggcgtcgagtgcactgacaaactccctgctttgtcgtcctccctcttcgttcctttcacaagagccaccaagtcaatgcaggcagactttgagcgagagctcatgtcactgccacgtgtcagtttcatggtctcagacggtttcttgtggtggacgcaagagtcagctcgaaagctagggtttcctcggcttgttttctttggtatgaattgcgcttccaccgttatatgtgacagtgtttttcaaaaccagcttctatctaatgttaagtccgagacggagccagtttctgtaccggagtttccgtggattaaggttaggaaatgtgatttcgttaaagatatgtttgatccaaaaaccaccacagatcctggattcaagcttatcctagatcaagtcacgtctatgaatcaaagccaaggtatcatattcaatacatttgacgaccttgaacccgtgtttattgatttctacaagcgtaaacgcaaactcaagctttgggcagttggaccgctttgttacgtaaataacttcttggatgatgaagtagaagagaaggtcaaacctagttggatgaaatggctagatgaaaagcgagacaagggatgcaatgttctgtatgtggctttcgggtcacaagccgagatctcgagagaacaactagaggagattgcgttagggttggaagaatcgaaggtgaacttcttgtgggtggtcaaaggaaatgaaataggaaaagggtttgaagagagagtgggagaaagaggaatgatggtgagagatgaatgggttgatcagaggaagatattagagcacgagagtgttagagggttcttgagccattgtgggtggaattctctgacggagagcatttgctcggaggttccaatcttggcgtttcctttagcagcggagcaacctctgaatgcgattttggtggtggaagagctgagagtggcggagagagtggtggcggcgagtgaaggggttgtgagaagagaagagattgcagagaaagtgaaggagttgatggagggagagaaagggaaagagctgaggaggaatgtcgaggcatatggtaagatggcgaagaaggctttggaggaaggtattggttcgtctaggaagaatttagacaaccttatcaacgagttttgtaacaatggaacatgatgatgtatgttaacacc

SEQ ID NO: 34274 - protein, 467 aa, Arabidopsis thaliana
  misc_feature (1)..(467): Ceres Seq. ID no. 13605685
MELEKVHVVLFPYLSKGHMIPMLQLARLLLSHSFAGDISVTVFTTPLNRPFIVDSLSGTKATIVDVPFPDNVPEIPPGVECTDKLPALSSSLFVPFTRATKSMQADFERELMSLPRVSFMVSDGFLWWTQESARKLGFPRLVFFGMNCASTVICDSVFQNQLLSNVKSETEPVSVPEFPWIKVRKCDFVKDMFDPKTTTDPGFKLILDQVTSMNQSQGIIFNTFDDLEPVFIDFYKRKRKLKLWAVGPLCYVNNFLDDEVEEKVKPSWMKWLDEKRDKGCNVLYVAFGSQAEISREQLEEIALGLEESKVNFLWVVKGNEIGKGFEERVGERGMMVRDEWVDQRKILEHESVRGFLSHCGWNSLTESICSEVPILAFPLAAEQPLNAILVVEELRVAERVVAASEGVVRREEIAEKVKELMEGEKGKELRRNVEAYGKMAKKALEEGIGSSRKNLDNLINEFCNNGT

SEQ ID NO: 34275 - protein, 449 aa, Arabidopsis thaliana
  misc_feature (1)..(449): Ceres Seq. ID no. 13605686
MIPMLQLARLLLSHSFAGDISVTVFTTPLNRPFIVDSLSGTKATIVDVPFPDNVPEIPPGVECTDKLPALSSSLFVPFTRATKSMQADFERELMSLPRVSFMVSDGFLWWTQESARKLGFPRLVFFGMNCASTVICDSVFQNQLLSNVKSETEPVSVPEFPWIKVRKCDFVKDMFDPKTTTDPGFKLILDQVTSMNQSQGIIFNTFDDLEPVFIDFYKRKRKLKLWAVGPLCYVNNFLDDEVEEKVKPSWMKWLDEKRDKGCNVLYVAFGSQAEISREQLEEIALGLEESKVNFLWVVKGNEIGKGFEERVGERGMMVRDEWVDQRKILEHESVRGFLSHCGWNSLTESICSEVPILAFPLAAEQPLNAILVVEELRVAERVVAASEGVVRREEIAEKVKELMEGEKGKELRRNVEAYGKMAKKALEEGIGSSRKNLDNLINEFCNNGT

SEQ ID NO: 34276 - protein, 446 aa, Arabidopsis thaliana
  misc_feature (1)..(446): Ceres Seq. ID no. 13605687
MLQLARLLLSHSFAGDISVTVFTTPLNRPFIVDSLSGTKATIVDVPFPDNVPEIPPGVECTDKLPALSSSLFVPFTRATKSMQADFERELMSLPRVSFMVSDGFLWWTQESARKLGFPRLVFFGMNCASTVICDSVFQNQLLSNVKSETEPVSVPEFPWIKVRKCDFVKDMFDPKTTTDPGFKLILDQVTSMNQSQGIIFNTFDDLEPVFIDFYKRKRKLKLWAVGPLCYVNNFLDDEVEEKVKPSWMKWLDEKRDKGCNVLYVAFGSQAEISREQLEEIALGLEESKVNFLWVVKGNEIGKGFEERVGERGMMVRDEWVDQRKILEHESVRGFLSHCGWNSLTESICSEVPILAFPLAAEQPLNAILVVEELRVAERVVAASEGVVRREEIAEKVKELMEGEKGKELRRNVEAYGKMAKKALEEGIGSSRKNLDNLINEFCNNGT

SEQ ID NO: 34277 - DNA, 596 bp, Arabidopsis thaliana
  misc_feature (1)..(596): Ceres Seq. ID no. 13605691
tgaagagagcgagatggcaacggcgtcgtttaggtggatcttgcagctccacagagacgtaccaaaagcggctcgattctatgagaaaggtctcgatttctccgtcaatgtcgttaccttacgttgggctgaacttcagtcaggtcccctcaagctagctcttatgcaagctcccagcgagcatgtgatgagtgagaaaggatactcttcgttactatcgttcactgtagcagacattaatacaacaatctctaaacttatggaattaggagctgaactcgatggctctatcaaatatgaagtccatggcaaggttgcttctgtgagatgtcttgatggtcatgtgctcggactctatgaaccttcatgagttttctattcagttcggattatgtggatttgattttgtttttttcgatccgattttggttgaataatgtttcaaaattttgctaatcggatgtttggtaaggacttagctctaagacaaatgtaaatctaatatatccggcgcagaaaagtcgttaattgattgttcaactaatcgtctagacattcgatctattaaagacaggggagatatgttttacaaattt

SEQ ID NO: 34278 - protein, 122 aa, Arabidopsis thaliana
  misc_feature (1)..(122): Ceres Seq. ID no. 13605692
EESEMATASFRWILQLHRDVPKAARFYEKGLDFSVNVVTLRWAELQSGPLKLALMQAPSEHVMSEKGYSSLLSFTVADINTTISKLMELGAELDGSIKYEVHGKVASVRCLDGHVLGLYEPS

SEQ ID NO: 34279 - protein, 118 aa, Arabidopsis thaliana
  misc_feature (1)..(118): Ceres Seq. ID no. 13605693
MATASFRWILQLHRDVPKAARFYEKGLDFSVNVVTLRWAELQSGPLKLALMQAPSEHVMSEKGYSSLLSFTVADINTTISKLMELGAELDGSIKYEVHGKVASVRCLDGHVLGLYEPS

SEQ ID NO: 34280 - protein, 68 aa, Arabidopsis thaliana
  misc_feature (1)..(68): Ceres Seq. ID no. 13605694
MQAPSEHVMSEKGYSSLLSFTVADINTTISKLMELGAELDGSIKYEVHGKVASVRCLDGHVLGLYEPS

SEQ ID NO: 34281 - DNA, 1212 bp, Arabidopsis thaliana
  misc_feature (1)..(1212): Ceres Seq. ID no. 13605706
aaaaacttgcaaaactctcgtccgagatatatcgactccgcgaccctccactactctgctgatctacacacacacacaaaaaaaaaaaaactcaatcgccagcaacaatggcgaagctcacacttctcttcttcctttcctttctcatcttctcctcatccatcgctttccaatcagacgagctcctcgttgacgacgacgaatttggtctagaaggagcaaagccccgctccaccgatctttacacatcttcttcttcttcgccacagcagcagcaacagactccaactatccggagaagatactcagatcctaccgatttggattcaaaagtccaatttactctcgaacatgccttcggtgactctgatttctcccccgccggtactttctccgctcgtctcaaaacctggagtcatggcggaaagacattaacgaagctgcgattctctagaaatgatttttctgctgaagagaaagatgcattcaagaatctgctgaaaggagatgacttttatcggattcggcttccatctaatgtggttagtccaccagggagagagtttgtgattgcatcagtgagagctagatgtctaccacgggatggcttggatgagcatttcattatacacatggaaggtgctaacatcttggcagttagttatggttctcctggggcgtgtcaatatcctcgccaattgaaacttccagcaaaatggtcgtttaactctcacacaattctgaaaagcagtgagcaggcgccaagaactccaatattcactgaggagattctaggcagtgagaatgtagagggagaagttgaaccaccaccagagagatcattttgggcgaaatattggatgtatttgataccgctgggactcgtagtgatgaatgccgtgacacaagcatcaaacatggctgaagaacctgcgggtggacaggcaggaggtgcacaagtgcaaccagctgccaggagaagatgattccacttttacttctcccaaagcaatgaaagctgcagctggttagagatgatgattcaacagatcttcatgtaaaccatcttgccatcatttggttttatgtaacctttaattttaatcctcgatcggtgtgtttttgtactcaccaatcgggaaatcaaaaatcttgtcttcatgacatatcaagaacaaagacatttagcagcttccatatcttgttttgatc

SEQ ID NO: 34282 - protein, 292 aa, Arabidopsis thaliana
  misc_feature (1)..(292): Ceres Seq. ID no. 13605707
MAKLTLLFFLSFLIFSSSIAFQSDELLVDDDEFGLEGAKPRSTDLYTSSSSSPQQQQQTPTIRRRYSDPTDLDSKVQFTLEHAFGDSDFSPAGTFSARLKTWSHGGKTLTKLRFSRNDFSAEEKDAFKNLLKGDDFYRIRLPSNVVSPPGREFVIASVRARCLPRDGLDEHFIIHMEGANILAVSYGSPGACQYPRQLKLPAKWSFNSHTILKSSEQAPRTPIFTEEILGSENVEGEVEPPPERSFWAKYWMYLIPLGLVVMNAVTQASNMAEEPAGGQAGGAQVQPAARRR

SEQ ID NO: 34283 - DNA, 1253 bp, Arabidopsis thaliana
  misc_feature (1)..(1253): Ceres Seq. ID no. 13605708
acactcgtcttaccaaactctctcctacacaaccaaaaccatctctttgcaacaaaacttgttgtaactcatcttcttcttcttcttctccatcacagactcataacaaatgggagaagtttcagtggtggagaacaagaaagtgatactaaagaattatgtagatggtattcctacagaaacagacatggaagtgaaactcggagaaacaattgagctaaaagcaccaaaaggatcttcttgtttcctcgtcaaaaatctatacttgtcttgtgatccttacatgagaggtcgtatgcgtgattttcacggttcctatctcccgccttttgttcctggccaacgtatcgaagggtttggtttagcaagagtgatagattctgatgatactaattataagcccggcgatatagtctctggtatcattggttgggaagaatacagtttgctacgtagttcagataacctacagttgagaaatattcagttagacgacgacattccgctttcttatcatctcggacttctcgggatggctggatttacagcatatgcagggtttaatgagatatgttgtcctaagaaaggggacagtgtttttgtctctgcagcatgtggagcagttggacaacttgttggtcagctagctaagttgcacggctgctatgttgttggtagcgccggtagtaagcaaaaggttgagatccttaaaaacgagcttggatatgatgaagcctttaactacaaggaagaggctgatcttgatactgctttgaagaggtacttcccggaggggatagatatctacttcgataacgtgggtggatccatgcttgatgcagcgctcctcaacatgaaggtacgtggaagaatcgcgctctgtggaatggtgtctttgcaaagcctctcaacttcatcacaaggaatcaagaacctatacagcgctatctacaaacgtttaaggttagaagggttcttgcagagcgattaccttcatatcttcccacagtttcttgaaaatgtcaagagatattacaaagaaggcaagattgtctacgtcgaagatatatctgaaggcctcgacctcgctcccgctgcacttgttgggctgttttccgggaaaaatatcggtaaacaggttgttcgggttgctaaagagtgattgtttctgaaagtatattgcaagtgatttaagaacatacattggatgaaataaagccactataagtctcttatggaaaaacgttagttaa

SEQ ID NO: 34284 - protein, 350 aa, Arabidopsis thaliana
  misc_feature (1)..(350): Ceres Seq. ID no. 13605709
MGEVSVVENKKVILKNYVDGIPTETDMEVKLGETIELKAPKGSSCFLVKNLYLSCDPYMRGRMRDFHGSYLPPFVPGQRIEGFGLARVIDSDDTNYKPGDIVSGIIGWEEYSLLRSSDNLQLRNIQLDDDIPLSYHLGLLGMAGFTAYAGFNEICCPKKGDSVFVSAACGAVGQLVGQLAKLHGCYVVGSAGSKQKVEILKNELGYDEAFNYKEEADLDTALKRYFPEGIDIYFDNVGGSMLDAALLNMKVRGRIALCGMVSLQSLSTSSQGIKNLYSAIYKRLRLEGFLQSDYLHIFPQFLENVKRYYKEGKIVYVEDISEGLDLAPAALVGLFSGKNIGKQVVRVAKE

SEQ ID NO: 34285 - protein, 324 aa, Arabidopsis thaliana
  misc_feature (1)..(324): Ceres Seq. ID no. 13605710
MEVKLGETIELKAPKGSSCFLVKNLYLSCDPYMRGRMRDFHGSYLPPFVPGQRIEGFGLARVIDSDDTNYKPGDIVSGIIGWEEYSLLRSSDNLQLRNIQLDDDIPLSYHLGLLGMAGFTAYAGFNEICCPKKGDSVFVSAACGAVGQLVGQLAKLHGCYVVGSAGSKQKVEILKNELGYDEAFNYKEEADLDTALKRYFPEGIDIYFDNVGGSMLDAALLNMKVRGRIALCGMVSLQSLSTSSQGIKNLYSAIYKRLRLEGFLQSDYLHIFPQFLENVKRYYKEGKIVYVEDISEGLDLAPAALVGLFSGKNIGKQVVRVAKE

SEQ ID NO: 34286 - protein, 292 aa, Arabidopsis thaliana
  misc_feature (1)..(292): Ceres Seq. ID no. 13605711
MRGRMRDFHGSYLPPFVPGQRIEGFGLARVIDSDDTNYKPGDIVSGIIGWEEYSLLRSSDNLQLRNIQLDDDIPLSYHLGLLGMAGFTAYAGFNEICCPKKGDSVFVSAACGAVGQLVGQLAKLHGCYVVGSAGSKQKVEILKNELGYDEAFNYKEEADLDTALKRYFPEGIDIYFDNVGGSMLDAALLNMKVRGRIALCGMVSLQSLSTSSQGIKNLYSAIYKRLRLEGFLQSDYLHIFPQFLENVKRYYKEGKIVYVEDISEGLDLAPAALVGLFSGKNIGKQVVRVAKE

SEQ ID NO: 34287 - DNA, 2934 bp, Arabidopsis thaliana
  misc_feature (1)..(2934): Ceres Seq. ID no. 13605736
ggcgctgtgtcgtcttcgtcttcttcttccttcttcttcttcatctctctctttcgttttctcagtaagtgaaggatttgcagaagtagatgattgaatatccatggagggtgattggtttcaggaggtatgggagatggagatgagcaaagtaaagagttaggaggagtttcgtcttcgagtcgtcgttgttcttccggtactgctggtgctgcaaatgcagaagcaagaatgaagtttgctgctgttgatgctataacagaattagtgtggtctcctagcaacggtctaagcttaagatgtgcagatatcagtttcacgggaaaggcaaaattactctctcctaacttctttgatataggactaactaacatggcgattcactcaaatagcacaagtattgaagaccaagaagatcacgtagatgtcgaattgagaaaccgagatcaagtgaaccaagcaatgattggtggttctgttgaggatatgaaacctgaaatggttgaggataaggttgaaaccaatgatgatataaagaatgaagaagcaggatgttccaaaagatcttcagatagtccgaaagctatggaaggagaaaccagagacttgttggttaatgaacagttgaggatggaaagtgctggatctcaagaagaaggggataaggcgcataatagagttgatcgtttagaatcaatggatgagaacaacctcgcaactcttgctgttgtagcatgtgaaggtaaaggggactatttgccggagggtgaggctggacctagtggttcctacaggcgtcgtgagaaagcaaaagggaaagagaaagctttatctgatgaaaactttggtggtgatggtgaagatgaggatgaggagagttttggtagtgtagaaagttgcaatagtgcgggtttgctctcaaggggaaagaaaagaccaggctttgaggagcagctgatttttggaagcaaacggctcaaaacgttaaatcaagaatgtttggggtcaacttcaaagctcaagcaagatagttccttcatgaattggatatcaaatatgactaaaggaatctggaaaggtaatgaagaagacaattctccttttgtagctcttaccaccacctcaaatgctaatggtcatggccaagtcaatgccatcgttgaccaacaacaattgagtccatgctgtgtgaaggaaaatagtggatgcagaaacaccggtttccagtcttttttccagtctatatattgtccgaagaaacaaagtcaagatgtcgtcgacatggatttcccgaatgatgttaatgctgctcctttgcaggaacttccctggattcctgaacattgcgacatttccaaaggggatgacttgtcttcatctggtaatgagattggtccagtggctgaacccaacatttcatcaggaaaagttgtatttaatcagacaagcaaaacacagtcttcagagaacaaacgtgaggacaaagagccaaacatctcgttgatgtctcttagtaagtctaagccaaatgaagagccaaaaacatgcggtgaagctgatggaaaggttagtccatgtttaaccaacagaaactctggtcttaaaagtttgtggattagtcggttttcttctaaaggttcgttccctcagaaaaaggcaagtgaaacggctaaagaggccaatgcttcagcctcagacgcagctaaaacccgtgattcacggaaaatgctggcagacaagaatgttataagacccagtatcagctcggtagatgggcccgataaaccggacactgtccttcctatagtttcgtcaatgagaatagagtcttcagaagcaatggcttctttgtttgctagaagattagaagcaatgaaaagcatcatgccctcaggttctttagctgagaatgcagaggaggaacagagggatctaatttgtttctactgcggtaaaaagggtcattgtttacgggattgtttggaagtaactgatactgagctcagagatctagtacagaacataagtgtgcggaatggaagagaagaagcgtcaagtctatgcattagatgttttcagcttagtcactgggctgcaacatgcccgaatgctcccctgtatggttcaggagctgaaggtagagctatgaagaacgctttagcttctacctctggcatgaagctgcccataagtggtttcacagacgtaccaagggcggtctttgatgctgttcaagtgcttcgcctgagccgcacagacgttctcaaatggataaacaccaagaagtctgtatcgggtctcgaagggttcttcttgcggttaaggctcgggaaatgggaagaagggcttggaggaacagggtattatgtagctcgcatagatggggacacagagggacaaagctcaaggagacattcagagaaaagcttaatttcagttaaggttaaaggtgtgacttgccttgttgagtctcagtttatctcaaaccaagactttcttgaggaggagttaaaggcctggtggcagagcgcggggaaaagtgccagaacaagcggctacgacggcatcccgtcggcggaggaacttagtcggaaaattcagcagagaaaaatgttaggcttttaggacatttgttcaagtagataaatgtttttaagttataggttttacgattacccgtgtattttttcggttgaaaaggagagtgtaaatttcttagttcagagggcatcgaatgtctcaaaccatacaacaatctaaaactggatgtccaatctatttagatttgcgagttttattcggatctttatgtctcgatgactatttattgtgattgttaagcttgtatagtctatgtgtgaaggatcaagtatcatggaagaacaaagtacattgatatcaagagagatattgtggtgtcttgctcatttttcg

SEQ ID NO: 34288 - protein, 831 aa, Arabidopsis thaliana
  misc_feature (1)..(831): Ceres Seq. ID no. 13605737
MGDGDEQSKELGGVSSSSRRCSSGTAGAANAEARMKFAAVDAITELVWSPSNGLSLRCADISFTGKAKLLSPNFFDIGLTNMAIHSNSTSIEDQEDHVDVELRNRDQVNQAMIGGSVEDMKPEMVEDKVETNDDIKNEEAGCSKRSSDSPKAMEGETRDLLVNEQLRMESAGSQEEGDKAHNRVDRLESMDENNLATLAVVACEGKGDYLPEGEAGPSGSYRRREKAKGKEKALSDENFGGDGEDEDEESFGSVESCNSAGLLSRGKKRPGFEEQLIFGSKRLKTLNQECLGSTSKLKQDSSFMNWISNMTKGIWKGNEEDNSPFVALTTTSNANGHGQVNAIVDQQQLSPCCVKENSGCRNTGFQSFFQSIYCPKKQSQDVVDMDFPNDVNAAPLQELPWIPEHCDISKGDDLSSSGNEIGPVAEPNISSGKVVFNQTSKTQSSENKREDKEPNISLMSLSKSKPNEEPKTCGEADGKVSPCLTNRNSGLKSLWISRFSSKGSFPQKKASETAKEANASASDAAKTRDSRKMLADKNVIRPSISSVDGPDKPDTVLPIVSSMRIESSEAMASLFARRLEAMKSIMPSGSLAENAEEEQRDLICFYCGKKGHCLRDCLEVTDTELRDLVQNISVRNGREEASSLCIRCFQLSHWAATCPNAPLYGSGAEGRAMKNALASTSGMKLPISGFTDVPRAVFDAVQVLRLSRTDVLKWINTKKSVSGLEGFFLRLRLGKWEEGLGGTGYYVARIDGDTEGQSSRRHSEKSLISVKVKGVTCLVESQFISNQDFLEEELKAWWQSAGKSARTSGYDGIPSAEELSRKIQQRKMLGF

SEQ ID NO: 34289 - protein, 797 aa, Arabidopsis thaliana
  misc_feature (1)..(797): Ceres Seq. ID no. 13605738
MKFAAVDAITELVWSPSNGLSLRCADISFTGKAKLLSPNFFDIGLTNMAIHSNSTSIEDQEDHVDVELRNRDQVNQAMIGGSVEDMKPEMVEDKVETNDDIKNEEAGCSKRSSDSPKAMEGETRDLLVNEQLRMESAGSQEEGDKAHNRVDRLESMDENNLATLAVVACEGKGDYLPEGEAGPSGSYRRREKAKGKEKALSDENFGGDGEDEDEESFGSVESCNSAGLLSRGKKRPGFEEQLIFGSKRLKTLNQECLGSTSKLKQDSSFMNWISNMTKGIWKGNEEDNSPFVALTTTSNANGHGQVNAIVDQQQLSPCCVKENSGCRNTGFQSFFQSIYCPKKQSQDVVDMDFPNDVNAAPLQELPWIPEHCDISKGDDLSSSGNEIGPVAEPNISSGKVVFNQTSKTQSSENKREDKEPNISLMSLSKSKPNEEPKTCGEADGKVSPCLTNRNSGLKSLWISRFSSKGSFPQKKASETAKEANASASDAAKTRDSRKMLADKNVIRPSISSVDGPDKPDTVLPIVSSMRIESSEAMASLFARRLEAMKSIMPSGSLAENAEEEQRDLICFYCGKKGHCLRDCLEVTDTELRDLVQNISVRNGREEASSLCIRCFQLSHWAATCPNAPLYGSGAEGRAMKNALASTSGMKLPISGFTDVPRAVFDAVQVLRLSRTDVLKWINTKKSVSGLEGFFLRLRLGKWEEGLGGTGYYVARIDGDTEGQSSRRHSEKSLISVKVKGVTCLVESQFISNQDFLEEELKAWWQSAGKSARTSGYDGIPSAEELSRKIQQRKMLGF

SEQ ID NO: 34290 - protein, 750 aa, Arabidopsis thaliana
  misc_feature (1)..(750): Ceres Seq. ID no. 13605739
MAIHSNSTSIEDQEDHVDVELRNRDQVNQAMIGGSVEDMKPEMVEDKVETNDDIKNEEAGCSKRSSDSPKAMEGETRDLLVNEQLRMESAGSQEEGDKAHNRVDRLESMDENNLATLAVVACEGKGDYLPEGEAGPSGSYRRREKAKGKEKALSDENFGGDGEDEDEESFGSVESCNSAGLLSRGKKRPGFEEQLIFGSKRLKTLNQECLGSTSKLKQDSSFMNWISNMTKGIWKGNEEDNSPFVALTTTSNANGHGQVNAIVDQQQLSPCCVKENSGCRNTGFQSFFQSIYCPKKQSQDVVDMDFPNDVNAAPLQELPWIPEHCDISKGDDLSSSGNEIGPVAEPNISSGKVVFNQTSKTQSSENKREDKEPNISLMSLSKSKPNEEPKTCGEADGKVSPCLTNRNSGLKSLWISRFSSKGSFPQKKASETAKEANASASDAAKTRDSRKMLADKNVIRPSISSVDGPDKPDTVLPIVSSMRIESSEAMASLFARRLEAMKSIMPSGSLAENAEEEQRDLICFYCGKKGHCLRDCLEVTDTELRDLVQNISVRNGREEASSLCIRCFQLSHWAATCPNAPLYGSGAEGRAMKNALASTSGMKLPISGFTDVPRAVFDAVQVLRLSRTDVLKWINTKKSVSGLEGFFLRLRLGKWEEGLGGTGYYVARIDGDTEGQSSRRHSEKSLISVKVKGVTCLVESQFISNQDFLEEELKAWWQSAGKSARTSGYDGIPSAEELSRKIQQRKMLGF

SEQ ID NO: 34291 - DNA, 1756 bp, Arabidopsis thaliana
  misc_feature (1)..(1756): Ceres Seq. ID no. 13605755
taccacctatcttagaaatggagttctcaagctttttgtttactattttactcttttcactgaatatttctcctcttgtttcagctcatggctccaaccatgaagactttcttaagtgtctttcttaccgaatgaacgacaacaccgtcgaacccaaagtcatacacacttccaaagactcttcctttttttccatattggattcttcgatacaaaatccaagattctcggtttccgaaacacctaaaccggtctcaatcatcactcccgttaaagccagtgacgttcaaactgtgatcagatgcgcacagctgcatggaattcatgtaaggactcggagcgccggtcactgctacgaaggtctctcttacattgcgtacaacaaaccattcgctgtcatcgatttaaggaatcttcggtctatatcattagacgttgataaccggacaggttgggtccaaaccggagcaacggctggggaattgtattatgagattgggaaaaccaccaaatctcttgctttcccggccggtattcacccaaccgttggtgtaggcggacaatttagcggtggtggttatggcacattgctaaggaaatacggtttagctgcggataacataatcgatgcacttgtggttgacgcgagtgggaggattcttgaccgacaagcaatgggcgaggattacttttgggctattcgtggagggggcggatcaagcttcggtgttatactatcgtggaaggttaaattagtcgatgttccatccacaattaccgtgtttaaagtccagaaaacatcgaagaaagaggccgttaggatcatcaagaaatggcaatatgctgcagataaggttcctgatgatcttttcattaggacaacattggagagatcaaacaagaacgcagtacacgctttgttcactggactatatattggtccggtgaacaatctattggcgttgatggaagaaaagtttccggaactaggtcttgagaaagaaggttgtgaagagatgagttggattgagtctgtactctggtttgctgatttccctaaaggagaatctcttggtgttctcacgaatcgtgagcgtacatctctatctttcaaaggcaaagatgattttgtccaagaaccgatacccgaggctgcaattcaagagatatggaggcgattagaagcccccgaggctcggcttggaaagatcatattaactccatttggtgggaaaatgagtgaaatggcagagtacgaaacaccattcccacatcgaggagggaatctctatgagattcagtatgtggcttactggagagaagaggaagacaagaacaagacggagacagataaatatctgaaatgggtcgatagcgtttacgaatttatgactccatatgtttcgaaatctccaagaggagcttatgtcaatttcaaggatatggatttgggtatgtatcttggaaagaagaagacaaagtacgaggaaggaaagagttggggagtgaagtatttcaagaacaatttcgagagattggtgagagtgaagactagggttgatccaacagatttcttctgcgatgaacagagcattcctctggtgaacaaagttacctgaagatatcatttgaagttttttattagtcccttttctctgtgaaatcatctgtgcgtgttgaatattatgcgtcaagtgtgtaacttatgtgtgtgattgtgaattgtgatatgtgtgttgaataaacttttcatgtt

SEQ ID NO: 34292 - protein, 538 aa, Arabidopsis thaliana
  misc_feature (1)..(538): Ceres Seq. ID no. 13605756
PPILEMEFSSFLFTILLFSLNISPLVSAHGSNHEDFLKCLSYRMNDNTVEPKVIHTSKDSSFFSILDSSIQNPRFSVSETPKPVSIITPVKASDVQTVIRCAQLHGIHVRTRSAGHCYEGLSYIAYNKPFAVIDLRNLRSISLDVDNRTGWVQTGATAGELYYEIGKTTKSLAFPAGIHPTVGVGGQFSGGGYGTLLRKYGLAADNIIDALVVDASGRILDRQAMGEDYFWAIRGGGGSSFGVILSWKVKLVDVPSTITVFKVQKTSKKEAVRIIKKWQYAADKVPDDLFIRTTLERSNKNAVHALFTGLYIGPVNNLLALMEEKFPELGLEKEGCEEMSWIESVLWFADFPKGESLGVLTNRERTSLSFKGKDDFVQEPIPEAAIQEIWRRLEAPEARLGKIILTPFGGKMSEMAEYETPFPHRGGNLYEIQYVAYWREEEDKNKTETDKYLKWVDSVYEFMTPYVSKSPRGAYVNFKDMDLGMYLGKKKTKYEEGKSWGVKYFKNNFERLVRVKTRVDPTDFFCDEQSIPLVNKVT

SEQ ID NO: 34293 - protein, 533 aa, Arabidopsis thaliana
  misc_feature (1)..(533): Ceres Seq. ID no. 13605757
MEFSSFLFTILLFSLNISPLVSAHGSNHEDFLKCLSYRMNDNTVEPKVIHTSKDSSFFSILDSSIQNPRFSVSETPKPVSIITPVKASDVQTVIRCAQLHGIHVRTRSAGHCYEGLSYIAYNKPFAVIDLRNLRSISLDVDNRTGWVQTGATAGELYYEIGKTTKSLAFPAGIHPTVGVGGQFSGGGYGTLLRKYGLAADNIIDALVVDASGRILDRQAMGEDYFWAIRGGGGSSFGVILSWKVKLVDVPSTITVFKVQKTSKKEAVRIIKKWQYAADKVPDDLFIRTTLERSNKNAVHALFTGLYIGPVNNLLALMEEKFPELGLEKEGCEEMSWIESVLWFADFPKGESLGVLTNRERTSLSFKGKDDFVQEPIPEAAIQEIWRRLEAPEARLGKIILTPFGGKMSEMAEYETPFPHRGGNLYEIQYVAYWREEEDKNKTETDKYLKWVDSVYEFMTPYVSKSPRGAYVNFKDMDLGMYLGKKKTKYEEGKSWGVKYFKNNFERLVRVKTRVDPTDFFCDEQSIPLVNKVT

SEQ ID NO: 34294 - protein, 495 aa, Arabidopsis thaliana
  misc_feature (1)..(495): Ceres Seq. ID no. 13605758
MNDNTVEPKVIHTSKDSSFFSILDSSIQNPRFSVSETPKPVSIITPVKASDVQTVIRCAQLHGIHVRTRSAGHCYEGLSYIAYNKPFAVIDLRNLRSISLDVDNRTGWVQTGATAGELYYEIGKTTKSLAFPAGIHPTVGVGGQFSGGGYGTLLRKYGLAADNIIDALVVDASGRILDRQAMGEDYFWAIRGGGGSSFGVILSWKVKLVDVPSTITVFKVQKTSKKEAVRIIKKWQYAADKVPDDLFIRTTLERSNKNAVHALFTGLYIGPVNNLLALMEEKFPELGLEKEGCEEMSWIESVLWFADFPKGESLGVLTNRERTSLSFKGKDDFVQEPIPEAAIQEIWRRLEAPEARLGKIILTPFGGKMSEMAEYETPFPHRGGNLYEIQYVAYWREEEDKNKTETDKYLKWVDSVYEFMTPYVSKSPRGAYVNFKDMDLGMYLGKKKTKYEEGKSWGVKYFKNNFERLVRVKTRVDPTDFFCDEQSIPLVNKVT

SEQ ID NO: 34295 - DNA, 4585 bp, Arabidopsis thaliana
  misc_feature (1)..(4585): Ceres Seq. ID no. 13605763
atagaggaggtacgatactccttcgtcagccacctctccaaagctctccagcgaaaaggtgtaaacgatgtcttcatcgatagcgatgattcgctttccaacgagtctcaatcaatggtcgagagagctagggtttctgttatgattttaccaggaaaccgtacggtatctcttgacaagctcgtgaaggttctcgattgccagaagaacaaagatcaagtggtggttccggtgttgtacggtgtcagatcatcagagaccgaatggcttagcgcgctggattcgaaaggattctcatcagtacaccattccaggaaagaatgtagtgactcccagcttgtaaaagagactgttagagatgtgtatgagaagctcttttatatggaacgaattggaatatattcgaagctgctggagattgagaaaatgattaacaagcaaccgttggacatccgttgtgttggaatttggggtatgcctggcataggcaagactacacttgctaaagcagtctttgaccaaatgtctggtgagtttgatgctcattgctttattgaagactacaccaaagctattcaagagaagggtgtttattgtttgctggaggaacagtttttgaaagaaaatgctggtgctagtggtaccgttacgaaattgagcttgcttagggatagattaaacaataagagggttcttgttgttcttgatgatgtccgcagtcctctggttgtggagtcttttcttggagggtttgactggtttggtcccaaaagtctaatcatcataacctccaaagataaatcggtgtttcgcctttgtcgagtcaatcaaatatacgaggttcagggtttaaatgagaaagaggctcttcaactcttctctttgtgtgcgtctatagacgatatggcagagcagaatctccacgaggtgtcaatgaaagttattaaatatgctaatggccatccattagctctcaatctctatggcagagaactgatggggaagaaaagaccaccagaaatggagatagcattcctcaaactcaaggaatgtcctccagctatttttgttgatgcaatcaagagctcgtatgacacactcaatgacagggaaaaaaacatttttttggacatagcttgtttcttccagggagaaaatgttgactacgtgatgcaactgcttgagggttgtggtttctttccacatgttggaattgatgttcttgtggagaagagtctggtgactatttcagaaaaccgagtgcggatgcataacttgatccaagatgttggccgacaaataataaatagagaaacaagacagactaagaggcgcagcagactgtgggaaccttgcagcatcaaatatttattagaagataaggaacaaaacgaaaatgaagaacaaaaaacaacttttgaacgtgctcaggtccctgaagagatcgaaggcatgtttctggacacatcaaacttaagttttgatattaagcatgttgcctttgataatatgttgaaccttagattgttcaagatttacagttccaatcctgaagtccatcatgtaaacaatttcctcaaaggctctctcagttctcttcctaatgtgctaagactcctgcattgggagaactatcctctgcagtttctgcctcaaaattttgatcctatacaccttgttgaaatcaacatgccgtacagccaacttaagaaactttggggtggaaccaaggacctggagatgttgaagacaatcaggctttgtcattcccaacaactagttgatattgacgatcttttaaaagctcaaaatcttgaggtagttgatctccaaggctgtacaagactgcagagtttcccagccaccggtcaattgctacatttacgagttgtaaatctctcaggttgcacagagatcaaaagtttcccagaaattcccccaaatattgagacactgaatctacaggggactggtataatagaattaccactttccattgttaattgcttggagctgaatgattgttctcgtttgcgaagtctgccaaacatggttaatttagaacttctcaaagcccttgatctttctggttgctcagagctcgagactatccagggtttcccacggaacctgaaagagttatatcttgttggcactgcagtaagacaagtgccacaacttcctcaaagtctagaattctttaatgcccatggttgtgtctctctcaaatcaattcgtttggacttcaagaagcttcctgtgcattacacatttagtaattgtttcgatctatctccacaagtggtcaacgattttttagtgcaggcgatggctaatgtgattgcaaaacacataccaagagagcgtcatgtcacaggcttttctcaaaagactgtgcagcgttcgagtcgtgacagtcagcaggaactcaacaaaactttggctttcagcttctgtgcgccctcacatgcgaatcaaaattccaaacttgatctgcaaccaggatcttcttcaatgacacgactagatccttcttggaggaacacacttgtgggctttgctatgctggtgcaagtcgcattttccgagggttactgtgatgatactgattttggcattagttgtgtttgcaaatggaaaaacaaggaaggccactctcataggagagaaataaatttgcattgttgggctttagggaaagctgttgaaagggatcatacgtttgtcttctttgatgtcaacatgcgtccagataccgatgaaggaaatgaccccgatatctgggctgatttagttgtttttgagttctttcctgtcaataaacagagaaagcctctaaatgatagttgcacagtgacaagatgtggagtccgtttaataactgctgtaaactgcaatacaagtatcgagaatatatcaccagttttgtccttggatccgatggaggtttctggtaatgaagatgaagaagtattgagagtcagatatgctggtttacaggagatatataaagctttgtttctttacatagcgggtttgttcaatgacgaggatgttggtttggtagcaccacttattgctaacattattgacatggacgttagttatgggctcaaggtcttagcctataggtctctcatacgtgtatcttccaatggggaaatagtgatgcactatttgctacgacaaatgggtaaagaaatcctccatacagaatcaaagaagactgacaaattagtcgacaatattcagagttccatgatcgcaacaaaggaaatcgagatcactcgttcaaagagtcgccgaaagaacaacaaggaaaagagagtggtttgcgtagtggatcgaggcagccggtccagtgacctatgggtttggcgaaagtatggtcaaaaacccatcaaaagttctccttatccaaggagttactatagatgtgccagctcgaaaggttgttttgctaggaaacaagtcgaacgtagccgcactgatccaaatgtttcagtaattacttacatctctgagcataaccatccattccccactctacgcaatactcttgccggctccactcgttcctcttcctccaaatgctcagatgtaactacttctgcctcatcgacagtctcccaagacaaagaaggaccggataaatcccatttgccttcctcccctgcttctcctccttatgcggccatggtggttaaggaggaggacatggagcaatgggacaatatggagttcgatgttgacgttgaagaagatactttcatacccgaattatttccagaggataccttcgctgatatggacaagcttgaggaaaattctcagactatgtttctctctcgcagaagcagcggaggcaacatggaagcccaagggaagaactctagtgatgatagggagttaaaaggaaaaaaaaaaaaattctttgagatgagacttgttctctctggtgcctcttctttcacctccaaccttttttgttcctcccaacaggtcaatggaagaggaaaagaactgaaaaacccaatttctctaaaccacaacaaagatttggactttctgttaaagaagttagctccgccactcacggcggttttacttgctgtttcacccatctgtttccctccagaatctcttgggcagactttggatatacagagaggagctacattgtttaatagagcttgtatcgggtgtcatgatacaggtggaaacattattcaacctggtgcaacgcttttcacaaaagacctcgaaagaaatggagttgatactgaggaagaaatatatcgtgttacctactttggaaagggaagaatgccgggatttggtgagaaatgcacaccgagaggacaatgtacctttggaccgcggttgcaggacgaagaaatcaagcttctcgctgaatttgtaaagtttcaagctgaccaaggctggccaactgtatctacggactagcgactaggcattcttcgtcttgtgagcgtttttgtaatccaattaatccatagggctgtatctacttacacttataacaattccttctgggaggtttcattgcaattgcttatgctcc

SEQ ID NO: 34296 - protein, 1488 aa, Arabidopsis thaliana
  misc_feature (1)..(1488): Ceres Seq. ID no. 13605764
IEEVRYSFVSHLSKALQRKGVNDVFIDSDDSLSNESQSMVERARVSVMILPGNRTVSLDKLVKVLDCQKNKDQVVVPVLYGVRSSETEWLSALDSKGFSSVHHSRKECSDSQLVKETVRDVYEKLFYMERIGIYSKLLEIEKMINKQPLDIRCVGIWGMPGIGKTTLAKAVFDQMSGEFDAHCFIEDYTKAIQEKGVYCLLEEQFLKENAGASGTVTKLSLLRDRLNNKRVLVVLDDVRSPLVVESFLGGFDWFGPKSLIIITSKDKSVFRLCRVNQIYEVQGLNEKEALQLFSLCASIDDMAEQNLHEVSMKVIKYANGHPLALNLYGRELMGKKRPPEMEIAFLKLKECPPAIFVDAIKSSYDTLNDREKNIFLDIACFFQGENVDYVMQLLEGCGFFPHVGIDVLVEKSLVTISENRVRMHNLIQDVGRQIINRETRQTKRRSRLWEPCSIKYLLEDKEQNENEEQKTTFERAQVPEEIEGMFLDTSNLSFDIKHVAFDNMLNLRLFKIYSSNPEVHHVNNFLKGSLSSLPNVLRLLHWENYPLQFLPQNFDPIHLVEINMPYSQLKKLWGGTKDLEMLKTIRLCHSQQLVDIDDLLKAQNLEVVDLQGCTRLQSFPATGQLLHLRVVNLSGCTEIKSFPEIPPNIETLNLQGTGIIELPLSIVNCLELNDCSRLRSLPNMVNLELLKALDLSGCSELETIQGFPRNLKELYLVGTAVRQVPQLPQSLEFFNAHGCVSLKSIRLDFKKLPVHYTFSNCFDLSPQVVNDFLVQAMANVIAKHIPRERHVTGFSQKTVQRSSRDSQQELNKTLAFSFCAPSHANQNSKLDLQPGSSSMTRLDPSWRNTLVGFAMLVQVAFSEGYCDDTDFGISCVCKWKNKEGHSHRREINLHCWALGKAVERDHTFVFFDVNMRPDTDEGNDPDIWADLVVFEFFPVNKQRKPLNDSCTVTRCGVRLITAVNCNTSIENISPVLSLDPMEVSGNEDEEVLRVRYAGLQEIYKALFLYIAGLFNDEDVGLVAPLIANIIDMDVSYGLKVLAYRSLIRVSSNGEIVMHYLLRQMGKEILHTESKKTDKLVDNIQSSMIATKEIEITRSKSRRKNNKEKRVVCVVDRGSRSSDLWVWRKYGQKPIKSSPYPRSYYRCASSKGCFARKQVERSRTDPNVSVITYISEHNHPFPTLRNTLAGSTRSSSSKCSDVTTSASSTVSQDKEGPDKSHLPSSPASPPYAAMVVKEEDMEQWDNMEFDVDVEEDTFIPELFPEDTFADMDKLEENSQTMFLSRRSSGGNMEAQGKNSSDDRELKGKKKKFFEMRLVLSGASSFTSNLFCSSQQVNGRGKELKNPISLNHNKDLDFLLKKLAPPLTAVLLAVSPICFPPESLGQTLDIQRGATLFNRACIGCHDTGGNIIQPGATLFTKDLERNGVDTEEEIYRVTYFGKGRMPGFGEKCTPRGQCTFGPRLQDEEIKLLAEFVKFQADQGWPTVSTD

SEQ ID NO: 34297 - protein, 1450 aa, Arabidopsis thaliana
  misc_feature (1)..(1450): Ceres Seq. ID no. 13605765
MVERARVSVMILPGNRTVSLDKLVKVLDCQKNKDQVVVPVLYGVRSSETEWLSALDSKGFSSVHHSRKECSDSQLVKETVRDVYEKLFYMERIGIYSKLLEIEKMINKQPLDIRCVGIWGMPGIGKTTLAKAVFDQMSGEFDAHCFIEDYTKAIQEKGVYCLLEEQFLKENAGASGTVTKLSLLRDRLNNKRVLVVLDDVRSPLVVESFLGGFDWFGPKSLIIITSKDKSVFRLCRVNQIYEVQGLNEKEALQLFSLCASIDDMAEQNLHEVSMKVIKYANGHPLALNLYGRELMGKKRPPEMEIAFLKLKECPPAIFVDAIKSSYDTLNDREKNIFLDIACFFQGENVDYVMQLLEGCGFFPHVGIDVLVEKSLVTISENRVRMHNLIQDVGRQIINRETRQTKRRSRLWEPCSIKYLLEDKEQNENEEQKTTFERAQVPEEIEGMFLDTSNLSFDIKHVAFDNMLNLRLFKIYSSNPEVHHVNNFLKGSLSSLPNVLRLLHWENYPLQFLPQNFDPIHLVEINMPYSQLKKLWGGTKDLEMLKTIRLCHSQQLVDIDDLLKAQNLEVVDLQGCTRLQSFPATGQLLHLRVVNLSGCTEIKSFPEIPPNIETLNLQGTGIIELPLSIVNCLELNDCSRLRSLPNMVNLELLKALDLSGCSELETIQGFPRNLKELYLVGTAVRQVPQLPQSLEFFNAHGCVSLKSIRLDFKKLPVHYTFSNCFDLSPQVVNDFLVQAMANVIAKHIPRERHVTGFSQKTVQRSSRDSQQELNKTLAFSFCAPSHANQNSKLDLQPGSSSMTRLDPSWRNTLVGFAMLVQVAFSEGYCDDTDFGISCVCKWKNKEGHSHRREINLHCWALGKAVERDHTFVFFDVNMRPDTDEGNDPDIWADLVVFEFFPVNKQRKPLNDSCTVTRCGVRLITAVNCNTSIENISPVLSLDPMEVSGNEDEEVLRVRYAGLQEIYKALFLYIAGLFNDEDVGLVAPLIANIIDMDVSYGLKVLAYRSLIRVSSNGEIVMHYLLRQMGKEILHTESKKTDKLVDNIQSSMIATKEIEITRSKSRRKNNKEKRVVCVVDRGSRSSDLWVWRKYGQKPIKSSPYPRSYYRCASSKGCFARKQVERSRTDPNVSVITYISEHNHPFPTLRNTLAGSTRSSSSKCSDVTTSASSTVSQDKEGPDKSHLPSSPASPPYAAMVVKEEDMEQWDNMEFDVDVEEDTFIPELFPEDTFADMDKLEENSQTMFLSRRSSGGNMEAQGKNSSDDRELKGKKKKFFEMRLVLSGASSFTSNLFCSSQQVNGRGKELKNPISLNHNKDLDFLLKKLAPPLTAVLLAVSPICFPPESLGQTLDIQRGATLFNRACIGCHDTGGNIIQPGATLFTKDLERNGVDTEEEIYRVTYFGKGRMPGFGEKCTPRGQCTFGPRLQDEEIKLLAEFVKFQADQGWPTVSTD

SEQ ID NO: 34298 - protein, 1441 aa, Arabidopsis thaliana
  misc_feature (1)..(1441): Ceres Seq. ID no. 13605766
MILPGNRTVSLDKLVKVLDCQKNKDQVVVPVLYGVRSSETEWLSALDSKGFSSVHHSRKECSDSQLVKETVRDVYEKLFYMERIGIYSKLLEIEKMINKQPLDIRCVGIWGMPGIGKTTLAKAVFDQMSGEFDAHCFIEDYTKAIQEKGVYCLLEEQFLKENAGASGTVTKLSLLRDRLNNKRVLVVLDDVRSPLVVESFLGGFDWFGPKSLIIITSKDKSVFRLCRVNQIYEVQGLNEKEALQLFSLCASIDDMAEQNLHEVSMKVIKYANGHPLALNLYGRELMGKKRPPEMEIAFLKLKECPPAIFVDAIKSSYDTLNDREKNIFLDIACFFQGENVDYVMQLLEGCGFFPHVGIDVLVEKSLVTISENRVRMHNLIQDVGRQIINRETRQTKRRSRLWEPCSIKYLLEDKEQNENEEQKTTFERAQVPEEIEGMFLDTSNLSFDIKHVAFDNMLNLRLFKIYSSNPEVHHVNNFLKGSLSSLPNVLRLLHWENYPLQFLPQNFDPIHLVEINMPYSQLKKLWGGTKDLEMLKTIRLCHSQQLVDIDDLLKAQNLEVVDLQGCTRLQSFPATGQLLHLRVVNLSGCTEIKSFPEIPPNIETLNLQGTGIIELPLSIVNCLELNDCSRLRSLPNMVNLELLKALDLSGCSELETIQGFPRNLKELYLVGTAVRQVPQLPQSLEFFNAHGCVSLKSIRLDFKKLPVHYTFSNCFDLSPQVVNDFLVQAMANVIAKHIPRERHVTGFSQKTVQRSSRDSQQELNKTLAFSFCAPSHANQNSKLDLQPGSSSMTRLDPSWRNTLVGFAMLVQVAFSEGYCDDTDFGISCVCKWKNKEGHSHRREINLHCWALGKAVERDHTFVFFDVNMRPDTDEGNDPDIWADLVVFEFFPVNKQRKPLNDSCTVTRCGVRLITAVNCNTSIENISPVLSLDPMEVSGNEDEEVLRVRYAGLQEIYKALFLYIAGLFNDEDVGLVAPLIANIIDMDVSYGLKVLAYRSLIRVSSNGEIVMHYLLRQMGKEILHTESKKTDKLVDNIQSSMIATKEIEITRSKSRRKNNKEKRVVCVVDRGSRSSDLWVWRKYGQKPIKSSPYPRSYYRCASSKGCFARKQVERSRTDPNVSVITYISEHNHPFPTLRNTLAGSTRSSSSKCSDVTTSASSTVSQDKEGPDKSHLPSSPASPPYAAMVVKEEDMEQWDNMEFDVDVEEDTFIPELFPEDTFADMDKLEENSQTMFLSRRSSGGNMEAQGKNSSDDRELKGKKKKFFEMRLVLSGASSFTSNLFCSSQQVNGRGKELKNPISLNHNKDLDFLLKKLAPPLTAVLLAVSPICFPPESLGQTLDIQRGATLFNRACIGCHDTGGNIIQPGATLFTKDLERNGVDTEEEIYRVTYFGKGRMPGFGEKCTPRGQCTFGPRLQDEEIKLLAEFVKFQADQGWPTVSTD

SEQ ID NO: 34299 - DNA, 2117 bp, Arabidopsis thaliana
  misc_feature (1)..(2117): Ceres Seq. ID no. 13605801
aatcaaatttgtttcatatatcactcaaagcttgatgagaagaaacacagatcaagaaagcccaattatgtcttattactcctctttcttcttccttttcctcttctcctttctcacgagtttcagagtttctgctcaagatcccacttacgtataccacacctgtcaaaatacggcaaattacacaagtaacagcacttacaacaacaatctcaagacccttttggcttctctttcttcccgcaacgcttcctactccaccggattccaaaacgccaccgtcggccaagctccagacagagtcaccggacttttcaactgccgtggagatgtctcaacggaagtttgccgtagatgcgtctcctttgccgtcaacgacaccttaactcggtgtcctaaccagaaagaagccacactttattacgatgagtgtgtacttagatactctaaccagaatattctctcgacactaataaccaccggtggagttatcttggttaacacccggaatgtgacatctaaccaactagacctgttaagtgatttggttttgcctactctgaaccaagccgccaccgtagccttgaacagttccaaaaaattcggtacgagaaaaaacaattttactgcgttgcagagtttctatggactggttcagtgcacacctgatctcacgagacaagactgttcgcgttgtctccaactggtcatcaatcaaatacctactgacagaattggtgcaagaattattaatccgagctgtacttcaagatacgagatctacgcgttttacaccgaatccgccgttccaccaccaccaccaccaccgtcaatttctactcctccagtttcagctcctccgcgatctggaaaagatgggaattcaaaggtgttagtgatagccattgttgtgcctattatagtggctgttctgctttttatagctggttattgtttccttacaagaagggcaaggaagagttattacacaccatctgcatttgctggagatgatatcacaacagcagactcactacagcttgattatagaacaattcaaactgcaacagatgattttgtagagagtaataagattggtcaaggtggatttggtgaggtttacaagggtactttatcggatgggactgaagttgcggtgaagcgactatcaaagtcatcaggacaaggtgaagtagagttcaagaacgaggttgttcttgttgcaaagctacaacatagaaatctggttagacttcttgggttttgtctagacggagaagaaagagtactggtctacgagtatgtgcccaacaaaagtcttgattacttcctctttgaccctgcaaagaaaggccagctggattggactcgacgatacaagattatcggtggagttgctcgagggattctgtatcttcatcaagactcacgactcacaatcatacaccgtgacctcaaagccagtaacattctcttggacgcggatatgaatcctaaaattgcagattttggaatggctaggatctttggattggaccaaaccgaagagaacacaagcagaatagttggtacctatggttacatgtctcccgagtatgcaatgcatggtcagtactcaatgaaatctgatgtctatagcttcggagtgttagttcttgagattataagtggcaagaagaatagcagcttctaccaaacagatggtgcacatgacttggtctcatatgcttgggggctttggagtaacgggcgaccattagaactcgtggatccagctattgtagaaaattgccaaaggaatgaagttgttcgatgtgtccatatcggtcttttatgtgttcaagaagatcctgctgagcgtccgacgttgtcaaccattgttctgatgctcactagtaacactgtgactttacccgtgccacggcaacccggtcttttctttcagagtagaattggaaaagacccgcttgatacagatacaacgagcaaatctcttctagggtctgttgacgatgcatccatcacagatatacatcctcgatgatgatgagtttttcccttcatacctgattcctgaatctattggtgttgaaaataagttaaaaacttcttttgtt

SEQ ID NO: 34300 - protein, 680 aa, Arabidopsis thaliana
  misc_feature (1)..(680): Ceres Seq. ID no. 13605802
IKFVSYITQSLMRRNTDQESPIMSYYSSFFFLFLFSFLTSFRVSAQDPTYVYHTCQNTANYTSNSTYNNNLKTLLASLSSRNASYSTGFQNATVGQAPDRVTGLFNCRGDVSTEVCRRCVSFAVNDTLTRCPNQKEATLYYDECVLRYSNQNILSTLITTGGVILVNTRNVTSNQLDLLSDLVLPTLNQAATVALNSSKKFGTRKNNFTALQSFYGLVQCTPDLTRQDCSRCLQLVINQIPTDRIGARIINPSCTSRYEIYAFYTESAVPPPPPPPSISTPPVSAPPRSGKDGNSKVLVIAIVVPIIVAVLLFIAGYCFLTRRARKSYYTPSAFAGDDITTADSLQLDYRTIQTATDDFVESNKIGQGGFGEVYKGTLSDGTEVAVKRLSKSSGQGEVEFKNEVVLVAKLQHRNLVRLLGFCLDGEERVLVYEYVPNKSLDYFLFDPAKKGQLDWTRRYKIIGGVARGILYLHQDSRLTIIHRDLKASNILLDADMNPKIADFGMARIFGLDQTEENTSRIVGTYGYMSPEYAMHGQYSMKSDVYSFGVLVLEIISGKKNSSFYQTDGAHDLVSYAWGLWSNGRPLELVDPAIVENCQRNEVVRCVHIGLLCVQEDPAERPTLSTIVLMLTSNTVTLPVPRQPGLFFQSRIGKDPLDTDTTSKSLLGSVDDASITDIHPR

SEQ ID NO: 34301 - protein, 669 aa, Arabidopsis thaliana
  misc_feature (1)..(669): Ceres Seq. ID no. 13605803
MRRNTDQESPIMSYYSSFFFLFLFSFLTSFRVSAQDPTYVYHTCQNTANYTSNSTYNNNLKTLLASLSSRNASYSTGFQNATVGQAPDRVTGLFNCRGDVSTEVCRRCVSFAVNDTLTRCPNQKEATLYYDECVLRYSNQNILSTLITTGGVILVNTRNVTSNQLDLLSDLVLPTLNQAATVALNSSKKFGTRKNNFTALQSFYGLVQCTPDLTRQDCSRCLQLVINQIPTDRIGARIINPSCTSRYEIYAFYTESAVPPPPPPPSISTPPVSAPPRSGKDGNSKVLVIAIVVPIIVAVLLFIAGYCFLTRRARKSYYTPSAFAGDDITTADSLQLDYRTIQTATDDFVESNKIGQGGFGEVYKGTLSDGTEVAVKRLSKSSGQGEVEFKNEVVLVAKLQHRNLVRLLGFCLDGEERVLVYEYVPNKSLDYFLFDPAKKGQLDWTRRYKIIGGVARGILYLHQDSRLTIIHRDLKASNILLDADMNPKIADFGMARIFGLDQTEENTSRIVGTYGYMSPEYAMHGQYSMKSDVYSFGVLVLEIISGKKNSSFYQTDGAHDLVSYAWGLWSNGRPLELVDPAIVENCQRNEVVRCVHIGLLCVQEDPAERPTLSTIVLMLTSNTVTLPVPRQPGLFFQSRIGKDPLDTDTTSKSLLGSVDDASITDIHPR

SEQ ID NO: 34302 - protein, 658 aa, Arabidopsis thaliana
  misc_feature (1)..(658): Ceres Seq. ID no. 13605804
MSYYSSFFFLFLFSFLTSFRVSAQDPTYVYHTCQNTANYTSNSTYNNNLKTLLASLSSRNASYSTGFQNATVGQAPDRVTGLFNCRGDVSTEVCRRCVSFAVNDTLTRCPNQKEATLYYDECVLRYSNQNILSTLITTGGVILVNTRNVTSNQLDLLSDLVLPTLNQAATVALNSSKKFGTRKNNFTALQSFYGLVQCTPDLTRQDCSRCLQLVINQIPTDRIGARIINPSCTSRYEIYAFYTESAVPPPPPPPSISTPPVSAPPRSGKDGNSKVLVIAIVVPIIVAVLLFIAGYCFLTRRARKSYYTPSAFAGDDITTADSLQLDYRTIQTATDDFVESNKIGQGGFGEVYKGTLSDGTEVAVKRLSKSSGQGEVEFKNEVVLVAKLQHRNLVRLLGFCLDGEERVLVYEYVPNKSLDYFLFDPAKKGQLDWTRRYKIIGGVARGILYLHQDSRLTIIHRDLKASNILLDADMNPKIADFGMARIFGLDQTEENTSRIVGTYGYMSPEYAMHGQYSMKSDVYSFGVLVLEIISGKKNSSFYQTDGAHDLVSYAWGLWSNGRPLELVDPAIVENCQRNEVVRCVHIGLLCVQEDPAERPTLSTIVLMLTSNTVTLPVPRQPGLFFQSRIGKDPLDTDTTSKSLLGSVDDASITDIHPR

SEQ ID NO: 34303 - DNA, 1440 bp, Arabidopsis thaliana
  misc_feature (1)..(1440): Ceres Seq. ID no. 13605824
tttctttcttcttcttccgtttcttttgcctctttcttttgtcttcttccttctatttttttgtggctttaaatttattgggttttgttcttcttcttcttctatagccgtttcatcttcacaatagcatcttcttctttttttccctgtcaagatcctgaatcatcggatctagaaggaaactagagtttgtgaaatcagattaaatcttgtgagaaatctctgaaaaagctgcaggtttctatacttctgttagtactctaattcaaccgagaaagtcgaatacatacacacattcataacacttttgaggaagatgttaagtggaaacaatggaaacactgcaccaccggttttcatgaacgagaaccagttgcaataccagacaaacctacgatcgaatcagcttcacttgctcggaaacatgggaggtggatgcactgttgatccagtaaactactttgctaacgataacctcgttccaatgatccgccctaacaaaagaggaagggaagccgaaagcattagtaacaacatccaaagacaacagcagaagcttcaaatgtctttgaactataattataacaacactagtgttcgagaagaagtgcctaaagagaatctagtctcaactggtctgagactatcttatgacgacgatgaacacaattcttcagtgacttctgctagtggtagcattttagctgcttctccaatctttcagtcactcgatgatagtcttcggattgatctccatagacaaaaagatgagtttgaccagttcatcaagatccaggcagctcaaatggcgaaaggtgtgagggatatgaaacagagacacatcgcgtcttttctcacaacattagagaaaggagtgagcaagaagcttcaagagaaagatcacgagatcaatgatatgaacaagaagaataaagagcttgtggagcggataaagcaagtggcaatggaagctcagaattggcactacagagcaaagtacaatgagtctgtggttaatgtcttaaaggcaaatctccaacaagcaatgtcacacaacaacagtgtgatagctgctgcagatcaaggcaaagaaggttttggagacagcgaaatagatgatgcagcttcatcatacatcgatccaaacaacaataacaacaacaacatggggattcatcagaggatgagatgcaaaatgtgcaacgtcaaggaagtatcggtgttgatagtgccatgtcggcacttgagtttgtgtaaagaatgtgatgtattcactaagatttgtcctgtatgcaagtctttgaaaagttcttgcgtccaagtcttcttttcttgatttgtgaccaaatggaacagaaggaaaaagagaatccattatataagtctttcatactctttttaaaaaaatattttgttatataaatttatttgtatcggtgt

SEQ ID NO: 34304 - protein, 339 aa, Arabidopsis thaliana
  misc_feature (1)..(339): Ceres Seq. ID no. 13605825
MLSGNNGNTAPPVFMNENQLQYQTNLRSNQLHLLGNMGGGCTVDPVNYFANDNLVPMIRPNKRGREAESISNNIQRQQQKLQMSLNYNYNNTSVREEVPKENLVSTGLRLSYDDDEHNSSVTSASGSILAASPIFQSLDDSLRIDLHRQKDEFDQFIKIQAAQMAKGVRDMKQRHIASFLTTLEKGVSKKLQEKDHEINDMNKKNKELVERIKQVAMEAQNWHYRAKYNESVVNVLKANLQQAMSHNNSVIAAADQGKEGFGDSEIDDAASSYIDPNNNNNNNMGIHQRMRCKMCNVKEVSVLIVPCRHLSLCKECDVFTKICPVCKSLKSSCVQVFFS

SEQ ID NO: 34305 - protein, 325 aa, Arabidopsis thaliana
  misc_feature (1)..(325): Ceres Seq. ID no. 13605826
MNENQLQYQTNLRSNQLHLLGNMGGGCTVDPVNYFANDNLVPMIRPNKRGREAESISNNIQRQQQKLQMSLNYNYNNTSVREEVPKENLVSTGLRLSYDDDEHNSSVTSASGSILAASPIFQSLDDSLRIDLHRQKDEFDQFIKIQAAQMAKGVRDMKQRHIASFLTTLEKGVSKKLQEKDHEINDMNKKNKELVERIKQVAMEAQNWHYRAKYNESVVNVLKANLQQAMSHNNSVIAAADQGKEGFGDSEIDDAASSYIDPNNNNNNNMGIHQRMRCKMCNVKEVSVLIVPCRHLSLCKECDVFTKICPVCKSLKSSCVQVFFS

SEQ ID NO: 34306 - protein, 303 aa, Arabidopsis thaliana
  misc_feature (1)..(303): Ceres Seq. ID no. 13605827
MGGGCTVDPVNYFANDNLVPMIRPNKRGREAESISNNIQRQQQKLQMSLNYNYNNTSVREEVPKENLVSTGLRLSYDDDEHNSSVTSASGSILAASPIFQSLDDSLRIDLHRQKDEFDQFIKIQAAQMAKGVRDMKQRHIASFLTTLEKGVSKKLQEKDHEINDMNKKNKELVERIKQVAMEAQNWHYRAKYNESVVNVLKANLQQAMSHNNSVIAAADQGKEGFGDSEIDDAASSYIDPNNNNNNNMGIHQRMRCKMCNVKEVSVLIVPCRHLSLCKECDVFTKICPVCKSLKSSCVQVFFS

SEQ ID NO: 34307 - DNA, 1792 bp, Arabidopsis thaliana
  misc_feature (1)..(1792): Ceres Seq. ID no. 13605828
atgataactggatacagcacgccaagtgcacatgttctaatgagctctcgggcattcaagtcatcatcatatagagctgcagcaggacagactcaacattatcttgctcgaagttcattgcctgtcgtaaagaactcgtggggatcaccaccttcacctttcaatgagcttccgagagtgtcaagaggcatgtgtgcctctgtcatatctctcagcctcgtcttctctgcttctgaatggagaacaagaaaaactcttttgactccacgagcgtcaaaagatgtaccttctagcttccgatttcccccgatgaccaagaagccacaatggtggtggagaactttggcttgcctgccttacctaatgccactgcatgaaacttggatgtatgcagaaaccgcttaccatctccacccattcctagaagattttgaattcttaacctacccatttctaggcgccataggaagattaccaagctggttcctcatggcttacttttttgtagcttatctagggatagtgcgaagaaaagaatggcctcacttcttcaggttccatgtagtgatgggtatgctgcttgaaatcgcactccaggttatagggaccgttagcaagtggatgcctcttggagtctattggggtaagtttgggatgcatttctggactgctgttgcgtttgcttatctgtttaccgtccttgaaagcatacggtgtgcacttgcggcccacaagcagcgaacaggttgtaccggaaaaaggaagttcaccgacgtcgttcccctctccaagttcgacgacaatctcctcctctctgtgataaagaatcatctcaagcctggcccctggattcacaagctcaagcctttttgtgatgtggatcttgattctctcaaactttttatacgccaatacccaaagggtgcaaaggctcctttcaaggagctggacatcaaagctcctttgaggaaacagcttgccaaagttgttatattagagtacccggtgatccatgtatatctaccttcacagagctatgaatttaaagttatcaaagactttaacacgacacctaatcctaatgattcgttatacgatggtcatggatgcacaaatggtataaccttccgagaagaagaaatagaagaagacgacattgactcctttgagccagaggttcttggtcttatgaaacaaatgaactataacccgtgtctgcgagtctcagagaaaagcaaggcagagggcgttggtaccaacaactcaaatcctcaggttgataccacagaacaagaagatgccggtaacatggagcttgaatttgagcaagggttaatagacacatactcagatctttttgcggagatgaacccaggtgactatttcaactttgaatgtgaatttgcaaaggggttggattcggatgataattgcaatctccaaaatttagatactgatttcatcgctgatggactagatttagaagaaggggaaatcgtcgaatgatggtcatagtcttnntctggcaaaaaggaattactctctgtgaaacattttngaggatnatgtncatncctgaagctctcttgttcgagcacattagctatacttggtaatagccaaagcttttactggaatgcaataagccacagcactgatggtcataagttttcggtctgggctttgatcaacaggtatttcttttgtagtaaaccagattactaggctgttctgtggtttgtagcaaacttgattgtttacatacaagatagttaacttaagaatgtctccg

SEQ ID NO: 34308 - protein, 501 aa, Arabidopsis thaliana
  misc_feature (1)..(501): Ceres Seq. ID no. 13605829
MITGYSTPSAHVLMSSRAFKSSSYRAAAGQTQHYLARSSLPVVKNSWGSPPSPFNELPRVSRGMCASVISLSLVFSASEWRTRKTLLTPRASKDVPSSFRFPPMTKKPQWWWRTLACLPYLMPLHETWMYAETAYHLHPFLEDFEFLTYPFLGAIGRLPSWFLMAYFFVAYLGIVRRKEWPHFFRFHVVMGMLLEIALQVIGTVSKWMPLGVYWGKFGMHFWTAVAFAYLFTVLESIRCALAAHKQRTGCTGKRKFTDVVPLSKFDDNLLLSVIKNHLKPGPWIHKLKPFCDVDLDSLKLFIRQYPKGAKAPFKELDIKAPLRKQLAKVVILEYPVIHVYLPSQSYEFKVIKDFNTTPNPNDSLYDGHGCTNGITFREEEIEEDDIDSFEPEVLGLMKQMNYNPCLRVSEKSKAEGVGTNNSNPQVDTTEQEDAGNMELEFEQGLIDTYSDLFAEMNPGDYFNFECEFAKGLDSDDNCNLQNLDTDFIADGLDLEEGEIVE

SEQ ID NO: 34309 - protein, 488 aa, Arabidopsis thaliana
  misc_feature (1)..(488): Ceres Seq. ID no. 13605830
MSSRAFKSSSYRAAAGQTQHYLARSSLPVVKNSWGSPPSPFNELPRVSRGMCASVISLSLVFSASEWRTRKTLLTPRASKDVPSSFRFPPMTKKPQWWWRTLACLPYLMPLHETWMYAETAYHLHPFLEDFEFLTYPFLGAIGRLPSWFLMAYFFVAYLGIVRRKEWPHFFRFHVVMGMLLEIALQVIGTVSKWMPLGVYWGKFGMHFWTAVAFAYLFTVLESIRCALAAHKQRTGCTGKRKFTDVVPLSKFDDNLLLSVIKNHLKPGPWIHKLKPFCDVDLDSLKLFIRQYPKGAKAPFKELDIKAPLRKQLAKVVILEYPVIHVYLPSQSYEFKVIKDFNTTPNPNDSLYDGHGCTNGITFREEEIEEDDIDSFEPEVLGLMKQMNYNPCLRVSEKSKAEGVGTNNSNPQVDTTEQEDAGNMELEFEQGLIDTYSDLFAEMNPGDYFNFECEFAKGLDSDDNCNLQNLDTDFIADGLDLEEGEIVE

SEQ ID NO: 34310 - protein, 438 aa, Arabidopsis thaliana
  misc_feature (1)..(438): Ceres Seq. ID no. 13605831
MCASVISLSLVFSASEWRTRKTLLTPRASKDVPSSFRFPPMTKKPQWWWRTLACLPYLMPLHETWMYAETAYHLHPFLEDFEFLTYPFLGAIGRLPSWFLMAYFFVAYLGIVRRKEWPHFFRFHVVMGMLLEIALQVIGTVSKWMPLGVYWGKFGMHFWTAVAFAYLFTVLESIRCALAAHKQRTGCTGKRKFTDVVPLSKFDDNLLLSVIKNHLKPGPWIHKLKPFCDVDLDSLKLFIRQYPKGAKAPFKELDIKAPLRKQLAKVVILEYPVIHVYLPSQSYEFKVIKDFNTTPNPNDSLYDGHGCTNGITFREEEIEEDDIDSFEPEVLGLMKQMNYNPCLRVSEKSKAEGVGTNNSNPQVDTTEQEDAGNMELEFEQGLIDTYSDLFAEMNPGDYFNFECEFAKGLDSDDNCNLQNLDTDFIADGLDLEEGEIVE

SEQ ID NO: 34311 - DNA, 1595 bp, Arabidopsis thaliana
  misc_feature (1)..(1595): Ceres Seq. ID no. 13605840
aaggagagacacagattcttgtattgatactcacttcagtggagctaagacaagtagaaaaaaaatggcgccaccgcattttctactggtaacgtttccggcgcaaggtcacgtgaacccatctctccgttttgctcgtcggctcatcaaaagaaccggcgcacgtgtcactttcgtcacttgtgtctccgtcttccacaactccatgatcgcaaaccacaacaaagtcgaaaatctctctttccttactttctccgacggtttcgacgatggaggcatttccacctacgaagaccgtcagaaaaggtcggtgaatctcaaggttaacggcgataaggcactatcggatttcatcgaagctactaagaatggtgactctcccgtgacttgcttgatctacacgattcttctcaattgggctccaaaagtagcacgtagatttcaacttccctccgctcttctctggatccaaccggctttggttttcaacatctattacactcatttcatgggaaacaagtccgttttcgagttacctaatctgtcttctctggaaatcagagatcttccatctttcctcacaccttccaacacaaacaaaggcgcatacgatgcgtttcaagaaatgatggagtttctcataaaagaaaccaaaccgaaaattctcatcaacactttcgattcgctggaaccagaggccttaacggctttcccgaatatcgatatggtggcggttggtcctttacttcccacggagattttctcaggaagcaccaacaaatcagttaaagatcaaagtagtagttatacactttggctagactcgaaaacagagtcctctgttatttacgtttcctttggaacaatggttgagttgtccaagaaacagatagaggaactagcgagagcactcatagaagggaaacgaccgtttttgtgggttataactgataaatccaacagagaaacgaaaacagaaggagaagaagagacagagattgagaagatagctggattcagacacgagcttgaagaggttgggatgattgtgtcgtggtgttcgcagatagaggttttaagtcaccgagccgtaggttgttttgtgactcattgtgggtggagctcgacgctggagagtttggttcttggcgttccggttgtggcgtttccgatgtggtcggatcaaccgacgaacgcgaagctactggaagaaagttggaagactggtgtgagggtaagagagaacaaggatggtttggtggagagaggagagatcaggaggtgtttggaagccgtgatggaggagaagtcggtggagttgagggaaaacgcaaagaaatggaagcgtttagcgatggaagcgggtagagaaggaggatcttcggataagaacatggaggcttttgtggaggatatttgtggagaatctcttattcaaaacttgtgtgaagcagaggaggtaaaagtaaagtaaataaaggacaaaagagttggtgtctagaagtggcggagtgttatttgctaatactgtcactttgtaatatcaaattcaattaaaacataaaatttactccatctagataaatatgtttttt

SEQ ID NO: 34312 - protein, 490 aa, Arabidopsis thaliana
  misc_feature (1)..(490): Ceres Seq. ID no. 13605841
RRDTDSCIDTHFSGAKTSRKKMAPPHFLLVTFPAQGHVNPSLRFARRLIKRTGARVTFVTCVSVFHNSMIANHNKVENLSFLTFSDGFDDGGISTYEDRQKRSVNLKVNGDKALSDFIEATKNGDSPVTCLIYTILLNWAPKVARRFQLPSALLWIQPALVFNIYYTHFMGNKSVFELPNLSSLEIRDLPSFLTPSNTNKGAYDAFQEMMEFLIKETKPKILINTFDSLEPEALTAFPNIDMVAVGPLLPTEIFSGSTNKSVKDQSSSYTLWLDSKTESSVIYVSFGTMVELSKKQIEELARALIEGKRPFLWVITDKSNRETKTEGEEETEIEKIAGFRHELEEVGMIVSWCSQIEVLSHRAVGCFVTHCGWSSTLESLVLGVPVVAFPMWSDQPTNAKLLEESWKTGVRVRENKDGLVERGEIRRCLEAVMEEKSVELRENAKKWKRLAMEAGREGGSSDKNMEAFVEDICGESLIQNLCEAEEVKVK

SEQ ID NO: 34313 - protein, 469 aa, Arabidopsis thaliana
  misc_feature (1)..(469): Ceres Seq. ID no. 13605842
MAPPHFLLVTFPAQGHVNPSLRFARRLIKRTGARVTFVTCVSVFHNSMIANHNKVENLSFLTFSDGFDDGGISTYEDRQKRSVNLKVNGDKALSDFIEATKNGDSPVTCLIYTILLNWAPKVARRFQLPSALLWIQPALVFNIYYTHFMGNKSVFELPNLSSLEIRDLPSFLTPSNTNKGAYDAFQEMMEFLIKETKPKILINTFDSLEPEALTAFPNIDMVAVGPLLPTEIFSGSTNKSVKDQSSSYTLWLDSKTESSVIYVSFGTMVELSKKQIEELARALIEGKRPFLWVITDKSNRETKTEGEEETEIEKIAGFRHELEEVGMIVSWCSQIEVLSHRAVGCFVTHCGWSSTLESLVLGVPVVAFPMWSDQPTNAKLLEESWKTGVRVRENKDGLVERGEIRRCLEAVMEEKSVELRENAKKWKRLAMEAGREGGSSDKNMEAFVEDICGESLIQNLCEAEEVKVK

SEQ ID NO: 34314 - protein, 422 aa, Arabidopsis thaliana
  misc_feature (1)..(422): Ceres Seq. ID no. 13605843
MIANHNKVENLSFLTFSDGFDDGGISTYEDRQKRSVNLKVNGDKALSDFIEATKNGDSPVTCLIYTILLNWAPKVARRFQLPSALLWIQPALVFNIYYTHFMGNKSVFELPNLSSLEIRDLPSFLTPSNTNKGAYDAFQEMMEFLIKETKPKILINTFDSLEPEALTAFPNIDMVAVGPLLPTEIFSGSTNKSVKDQSSSYTLWLDSKTESSVIYVSFGTMVELSKKQIEELARALIEGKRPFLWVITDKSNRETKTEGEEETEIEKIAGFRHELEEVGMIVSWCSQIEVLSHRAVGCFVTHCGWSSTLESLVLGVPVVAFPMWSDQPTNAKLLEESWKTGVRVRENKDGLVERGEIRRCLEAVMEEKSVELRENAKKWKRLAMEAGREGGSSDKNMEAFVEDICGESLIQNLCEAEEVKVK

SEQ ID NO: 34315 - DNA, 1820 bp, Arabidopsis thaliana
  misc_feature (1)..(1820): Ceres Seq. ID no. 13605855
aaatcttctgatgcacactagttcgaaggatcctttaatgggagagagaatgttctacttcttcttcttcttcttcttcttcttcttcctcctctctcgtcggatctctctgatttagtgatttttcaaatttcaagttttcttcacctttaattttgtgtctcgttgatctctctttggacattctgctttggattctggaggcttctcattagatctctattagtgggtttaggtcaagttcttgaaatggataaggagaaatctcctgcaccaccacctagtggaggtcttcctccaccatcgggtcgttactctgcgttttcacctaatggaagtagctttgcaatgaaagctgaatcatcttttcctcctttgactccaagtggaagcaatagctcagatgctaaccgattcagccatgatattagccgaatgccggataatccacctaagaacctaggccatcgccgagctcattcagagattcttactcttcctgatgacttaagctttgatagtgatcttggtgtggttggtgctgctgatggaccttctttctctgatgatactgacgaggacttactctatatgtatcttgatatggaaaaattcaattcttctgctacatcgacttctcaaatgggtgagccatcagaaccgacttggaggaatgaattagcctcgacttctaaccttcagagtacacccggtagctctagtgaaagaccgagaattagacaccaacacagccaatcgatggatggttcaacaactatcaagcctgagatgcttatgtcagggaatgaagatgtgtctggagttgactctaagaaagccatctctgctgctaaactttctgagcttgctctcattgatccaaaacgcgccaagaggatatgggcaaacaggcagtctgctgcgaggtcaaaagaaaggaagatgagatacattgcagagctcgagagaaaagtacagactttacaaacagaggccacatctctctcagcccagttgactctcttacagagagatacaaatggcctgggtgttgaaaacaatgagcttaaactgcgagtacaaactatggagcaacaggtccacctacaggatgctttaaatgatgcactaaaggaggaagtccagcatcttaaggtattgacggggcaaggtccatcaaatggtacatcaatgaactacggttcttttggatcaaaccagcaattctatcccaataatcagtcgatgcacactatcttagccgcacaacagttacagcagctccagatccagtcacagaaacagcaacaacaacaacagcaacaccagcaacaacaacagcagcagcagcagcaatttcactttcaacagcagcaactgtaccagcttcagcagcagcaacggcttcaacaacaggaacaacaaagcggggcttcagagctaagaagacccatgccttctcctggtcagaaagagagtgtgacatcgcctgatcgtgaaactcccttgacaaaagactgagtctagactgtgctaatgtccaatttagtaagttactcttggaaaatcttctttttcatcgcaggctcatggatttgggatttactgcattatagagttaaaaacaagacagcttagaagttgcggatttagaagttgttagtgaagcttttgttctcgtctgttggtagtttacaatcttctctttgtatgatcctaagctcttaaaaagttcttggatttggtcatttggttagaaatgggtccttagtccaagtctgtagtcgtttaaccatattcatattctttgccttttgttc

SEQ ID NO: 34316 - protein, 423 aa, Arabidopsis thaliana
  misc_feature (1)..(423): Ceres Seq. ID no. 13605856
MDKEKSPAPPPSGGLPPPSGRYSAFSPNGSSFAMKAESSFPPLTPSGSNSSDANRFSHDISRMPDNPPKNLGHRRAHSEILTLPDDLSFDSDLGVVGAADGPSFSDDTDEDLLYMYLDMEKFNSSATSTSQMGEPSEPTWRNELASTSNLQSTPGSSSERPRIRHQHSQSMDGSTTIKPEMLMSGNEDVSGVDSKKAISAAKLSELALIDPKRAKRIWANRQSAARSKERKMRYIAELERKVQTLQTEATSLSAQLTLLQRDTNGLGVENNELKLRVQTMEQQVHLQDALNDALKEEVQHLKVLTGQGPSNGTSMNYGSFGSNQQFYPNNQSMHTILAAQQLQQLQIQSQKQQQQQQQHQQQQQQQQQQFHFQQQQLYQLQQQQRLQQQEQQSGASELRRPMPSPGQKESVTSPDRETPLTKD

SEQ ID NO: 34317 - protein, 390 aa, Arabidopsis thaliana
  misc_feature (1)..(390): Ceres Seq. ID no. 13605857
MKAESSFPPLTPSGSNSSDANRFSHDISRMPDNPPKNLGHRRAHSEILTLPDDLSFDSDLGVVGAADGPSFSDDTDEDLLYMYLDMEKFNSSATSTSQMGEPSEPTWRNELASTSNLQSTPGSSSERPRIRHQHSQSMDGSTTIKPEMLMSGNEDVSGVDSKKAISAAKLSELALIDPKRAKRIWANRQSAARSKERKMRYIAELERKVQTLQTEATSLSAQLTLLQRDTNGLGVENNELKLRVQTMEQQVHLQDALNDALKEEVQHLKVLTGQGPSNGTSMNYGSFGSNQQFYPNNQSMHTILAAQQLQQLQIQSQKQQQQQQQHQQQQQQQQQQFHFQQQQLYQLQQQQRLQQQEQQSGASELRRPMPSPGQKESVTSPDRETPLTKD

SEQ ID NO: 34318 - protein, 361 aa, Arabidopsis thaliana
  misc_feature (1)..(361): Ceres Seq. ID no. 13605858
MPDNPPKNLGHRRAHSEILTLPDDLSFDSDLGVVGAADGPSFSDDTDEDLLYMYLDMEKFNSSATSTSQMGEPSEPTWRNELASTSNLQSTPGSSSERPRIRHQHSQSMDGSTTIKPEMLMSGNEDVSGVDSKKAISAAKLSELALIDPKRAKRIWANRQSAARSKERKMRYIAELERKVQTLQTEATSLSAQLTLLQRDTNGLGVENNELKLRVQTMEQQVHLQDALNDALKEEVQHLKVLTGQGPSNGTSMNYGSFGSNQQFYPNNQSMHTILAAQQLQQLQIQSQKQQQQQQQHQQQQQQQQQQFHFQQQQLYQLQQQQRLQQQEQQSGASELRRPMPSPGQKESVTSPDRETPLTKD

SEQ ID NO: 34319 - DNA, 3615 bp, Arabidopsis thaliana
  misc_feature (1)..(3615): Ceres Seq. ID no. 13605875
atggccgccgacgaactgatgccgtctcacaggtcacacaggactcccaaatcaggtcctaccgcgaggaagaaatctgaactagataagaagaagcgtggaatctccgttgacaagcagaaaaaccttaaggcgtttggtgttaaatcggttgttcatgcgaagaaagcaaaacatcacgctgcggagaaggagcaaaagcggcttcatcttccgaaaattgatcgtaattatggcgaagctcctcctttcgtcgtcgtggttcaaggccccccaggagttggaaagtctctcgtgattaaatctcttgtgaaggaatttacaaaacagaatgtacccgaggttcgaggacctattaccattgtacaaggtaaacagagaaggtttcaatttgtggagtgcccgaatgatatcaatgcgatggtggattgtgcaaaggttgctgatctagccctacttgttgtagacgggagttatggttttgagatggaaacctttgaattcctcaatattatgcaagtgcatggatttcctagagttatgggtgttctcactcaccttgataagttcaatgatgttaagaagctgagaaaaacaaaacatcatctcaagcatcggttttggactgaaatatatcatggagctaaattgttttatttatctggtctcattcatgggaagtatacgccgcgtgaagttcacaacctcgcccgctttgtaattgttatcaagcctcagccattgacatggcgaacagcacatccttatgtgttggttgatcgccttgaagatgttacccctccggagaaagttcagatggataagaaatgcgatagaaatatcactgtgtttggttacctacgtggttgtaacttcaaaaaaaggatgaaggttcatattgctggagttggtgacttcattgtagctggggtgactgctttaactgatccttgtcctttaccttcagctggcaagaaaaaagggctgagggacagggataagcttttctatgctcctatgtccgggattggagatcttgtgtatgacaaagatgctgtttacatcaacataaatagtcaccaagttcagtactctaaaactgacgatggaaagggagaacctactaataaaggaaagggcagagatgttggtgaagatttggtaaagtcgttgcagaacacaaagtattctgttgatgagaaactagataagacattcattaacttttttggcaaaaagactagtgccagttcagaaacaaaacttaaggctgaagatgcgtatcactctttgccggaaggttctgacagtgagtctcaatctggcgatgatgaggaggatatagtaggtaatgaaagtgaaatgaagcaggaaactgagattcatggtggaaggttgaggaggaaagctatcttcaagacggacttgaatgaagatgattttgaggaagcagacgatcttgaattggattcatatgacccagatacatatgattttgaggaagcagacgatgctgaatcagacgataatgaagttgaagatggtggagatgactctgcttccgattcagccgatggtgaaccaggggattatcagatagatgataaggactctggtaacatatcacaatggaaagcacccttgaaggagatagccagaaagaagaaccccaacttgatgcaaattgtgtatggagcatcatcattagctactcccttgataaatgagaaccatgacattagtgatgatgacgaaagtgatgatgaagacttctttaagccaaaaggagaacaacacaagaatttaggtggtggattggatgtgggatatgtcaactcagaggattgttctaaatttgtgaattatggatacctaaagaattggaaagagaaagaagtatgtgagagcattcgtgatcgatttaccactggtgattggtcaaaagctgctctgagagacaaaaatttaggtactggcggtgagggagaagatgatgaactttatggtgattttgaggatctagagacgggagagaagcacaaaagccatgagaacttggaatcgggtgcaaatgaaaatgaagatgaagatgcagaagtcgttgagcgtgatgggaacaatcctcgtagtcaagccgatgaaccaggatacgctgataaattgaaggaagcgcaggaaattacaaaacagaggaatgagttagaatacaatgatcttgacgaggaaactcgaattgagttagcaggattccggactggaacatacttgaggctggagattcacaatgttccttatgagatggttgaattctttgatccttgtcatccaattctagttggaggtattggtttcggcgaggacaatgttggatatatgcaggcccggttgaagaaacataggtggcataagaaagtactaaagacaagagatcctattattgtgtctattggatggagacgctatcagactattcctgtatttgccattgaagatcgcaatggcaggcatcgaatgctcaagtatactccagaacacatgcactgccttgcttcgttctggggtcctcttgtcccacccaacactggctttgtcgctttccagaacctgtcaaacaatcaggcaggatttaggataacagcgacttctgtagttctggagtttaatcaccaggcccgtattgtaaagaaaatcaagctggttgggactccgtgcaagatcaagaaaaagactgcatttatcaaagacatgttcacttctgaccttgaaatagctcgatttgaaggttcatctgttcggacagttagtggcattagaggacaagtaaaaaaggctggaaaaaacatgcttgataacaaggctgaagaagggattgcgaggtgtacctttgaagatcaaatccatatgagcgacatggtattcttaagggcttggactacagtggaagttccacaattttacaatcctctaacgacagccttgcaaccccgcgataagacctggaatgggatgaaaacttttggcgaactccgtagagagctgaatattcctattccagtgaataaggattcactctacaaggcaatcgaaagaaagcaaaagaagttcaatccactacagattccaaagcgtctagaaaaagatttaccgtttatgtcgaaacccaaaaatataccaaagcggaaaagaccatcactagaggataaaagagcagttataatggaaccgaaagaaagaaaagagcatactatcatccagcaattccagctgcttcaacatcacacgatgaagaagaaaaaggcaacggatcagaagaagaggaaagagtatgaagcagagaaagctaagaatgaggaaataaataagaaacgtaggagagaagagagacgggacagatatcgtgaggaagataaacagaaaaagaagacgagaagaagccttgattaatttattaataccttatttcaacttttgtgtaatactaaaagttttgttttcatctctattgttcttctgtgttgttttttactttaaaacttatgaatttatcaatcacatttctcgaatgatcactttctaccccaaatttttgaaatactgaaacttttcttggttact

SEQ ID NO: 34320 - protein, 1147 aa, Arabidopsis thaliana
  misc_feature (1)..(1147): Ceres Seq. ID no. 13605876
MAADELMPSHRSHRTPKSGPTARKKSELDKKKRGISVDKQKNLKAFGVKSVVHAKKAKHHAAEKEQKRLHLPKIDRNYGEAPPFVVVVQGPPGVGKSLVIKSLVKEFTKQNVPEVRGPITIVQGKQRRFQFVECPNDINAMVDCAKVADLALLVVDGSYGFEMETFEFLNIMQVHGFPRVMGVLTHLDKFNDVKKLRKTKHHLKHRFWTEIYHGAKLFYLSGLIHGKYTPREVHNLARFVIVIKPQPLTWRTAHPYVLVDRLEDVTPPEKVQMDKKCDRNITVFGYLRGCNFKKRMKVHIAGVGDFIVAGVTALTDPCPLPSAGKKKGLRDRDKLFYAPMSGIGDLVYDKDAVYININSHQVQYSKTDDGKGEPTNKGKGRDVGEDLVKSLQNTKYSVDEKLDKTFINFFGKKTSASSETKLKAEDAYHSLPEGSDSESQSGDDEEDIVGNESEMKQETEIHGGRLRRKAIFKTDLNEDDFEEADDLELDSYDPDTYDFEEADDAESDDNEVEDGGDDSASDSADGEPGDYQIDDKDSGNISQWKAPLKEIARKKNPNLMQIVYGASSLATPLINENHDISDDDESDDEDFFKPKGEQHKNLGGGLDVGYVNSEDCSKFVNYGYLKNWKEKEVCESIRDRFTTGDWSKAALRDKNLGTGGEGEDDELYGDFEDLETGEKHKSHENLESGANENEDEDAEVVERDGNNPRSQADEPGYADKLKEAQEITKQRNELEYNDLDEETRIELAGFRTGTYLRLEIHNVPYEMVEFFDPCHPILVGGIGFGEDNVGYMQARLKKHRWHKKVLKTRDPIIVSIGWRRYQTIPVFAIEDRNGRHRMLKYTPEHMHCLASFWGPLVPPNTGFVAFQNLSNNQAGFRITATSVVLEFNHQARIVKKIKLVGTPCKIKKKTAFIKDMFTSDLEIARFEGSSVRTVSGIRGQVKKAGKNMLDNKAEEGIARCTFEDQIHMSDMVFLRAWTTVEVPQFYNPLTTALQPRDKTWNGMKTFGELRRELNIPIPVNKDSLYKAIERKQKKFNPLQIPKRLEKDLPFMSKPKNIPKRKRPSLEDKRAVIMEPKERKEHTIIQQFQLLQHHTMKKKKATDQKKRKEYEAEKAKNEEINKKRRREERRDRYREEDKQKKKTRRSLD

SEQ ID NO: 34321 - protein, 1141 aa, Arabidopsis thaliana
  misc_feature (1)..(1141): Ceres Seq. ID no. 13605877
MPSHRSHRTPKSGPTARKKSELDKKKRGISVDKQKNLKAFGVKSVVHAKKAKHHAAEKEQKRLHLPKIDRNYGEAPPFVVVVQGPPGVGKSLVIKSLVKEFTKQNVPEVRGPITIVQGKQRRFQFVECPNDINAMVDCAKVADLALLVVDGSYGFEMETFEFLNIMQVHGFPRVMGVLTHLDKFNDVKKLRKTKHHLKHRFWTEIYHGAKLFYLSGLIHGKYTPREVHNLARFVIVIKPQPLTWRTAHPYVLVDRLEDVTPPEKVQMDKKCDRNITVFGYLRGCNFKKRMKVHIAGVGDFIVAGVTALTDPCPLPSAGKKKGLRDRDKLFYAPMSGIGDLVYDKDAVYININSHQVQYSKTDDGKGEPTNKGKGRDVGEDLVKSLQNTKYSVDEKLDKTFINFFGKKTSASSETKLKAEDAYHSLPEGSDSESQSGDDEEDIVGNESEMKQETEIHGGRLRRKAIFKTDLNEDDFEEADDLELDSYDPDTYDFEEADDAESDDNEVEDGGDDSASDSADGEPGDYQIDDKDSGNISQWKAPLKEIARKKNPNLMQIVYGASSLATPLINENHDISDDDESDDEDFFKPKGEQHKNLGGGLDVGYVNSEDCSKFVNYGYLKNWKEKEVCESIRDRFTTGDWSKAALRDKNLGTGGEGEDDELYGDFEDLETGEKHKSHENLESGANENEDEDAEVVERDGNNPRSQADEPGYADKLKEAQEITKQRNELEYNDLDEETRIELAGFRTGTYLRLEIHNVPYEMVEFFDPCHPILVGGIGFGEDNVGYMQARLKKHRWHKKVLKTRDPIIVSIGWRRYQTIPVFAIEDRNGRHRMLKYTPEHMHCLASFWGPLVPPNTGFVAFQNLSNNQAGFRITATSVVLEFNHQARIVKKIKLVGTPCKIKKKTAFIKDMFTSDLEIARFEGSSVRTVSGIRGQVKKAGKNMLDNKAEEGIARCTFEDQIHMSDMVFLRAWTTVEVPQFYNPLTTALQPRDKTWNGMKTFGELRRELNIPIPVNKDSLYKAIERKQKKFNPLQIPKRLEKDLPFMSKPKNIPKRKRPSLEDKRAVIMEPKERKEHTIIQQFQLLQHHTMKKKKATDQKKRKEYEAEKAKNEEINKKRRREERRDRYREEDKQKKKTRRSLD

SEQ ID NO: 34322 - protein, 1007 aa, Arabidopsis thaliana
  misc_feature (1)..(1007): Ceres Seq. ID no. 13605878
MVDCAKVADLALLVVDGSYGFEMETFEFLNIMQVHGFPRVMGVLTHLDKFNDVKKLRKTKHHLKHRFWTEIYHGAKLFYLSGLIHGKYTPREVHNLARFVIVIKPQPLTWRTAHPYVLVDRLEDVTPPEKVQMDKKCDRNITVFGYLRGCNFKKRMKVHIAGVGDFIVAGVTALTDPCPLPSAGKKKGLRDRDKLFYAPMSGIGDLVYDKDAVYININSHQVQYSKTDDGKGEPTNKGKGRDVGEDLVKSLQNTKYSVDEKLDKTFINFFGKKTSASSETKLKAEDAYHSLPEGSDSESQSGDDEEDIVGNESEMKQETEIHGGRLRRKAIFKTDLNEDDFEEADDLELDSYDPDTYDFEEADDAESDDNEVEDGGDDSASDSADGEPGDYQIDDKDSGNISQWKAPLKEIARKKNPNLMQIVYGASSLATPLINENHDISDDDESDDEDFFKPKGEQHKNLGGGLDVGYVNSEDCSKFVNYGYLKNWKEKEVCESIRDRFTTGDWSKAALRDKNLGTGGEGEDDELYGDFEDLETGEKHKSHENLESGANENEDEDAEVVERDGNNPRSQADEPGYADKLKEAQEITKQRNELEYNDLDEETRIELAGFRTGTYLRLEIHNVPYEMVEFFDPCHPILVGGIGFGEDNVGYMQARLKKHRWHKKVLKTRDPIIVSIGWRRYQTIPVFAIEDRNGRHRMLKYTPEHMHCLASFWGPLVPPNTGFVAFQNLSNNQAGFRITATSVVLEFNHQARIVKKIKLVGTPCKIKKKTAFIKDMFTSDLEIARFEGSSVRTVSGIRGQVKKAGKNMLDNKAEEGIARCTFEDQIHMSDMVFLRAWTTVEVPQFYNPLTTALQPRDKTWNGMKTFGELRRELNIPIPVNKDSLYKAIERKQKKFNPLQIPKRLEKDLPFMSKPKNIPKRKRPSLEDKRAVIMEPKERKEHTIIQQFQLLQHHTMKKKKATDQKKRKEYEAEKAKNEEINKKRRREERRDRYREEDKQKKKTRRSLD

SEQ ID NO: 34323 - DNA, 965 bp, Arabidopsis thaliana
  misc_feature (1)..(965): Ceres Seq. ID no. 13605883
cttggctcttagggctcgctaaattttctcagggctgtgaccatcgaccatcgtcgtcttcgcggagctcagttgaaagatgttaacggctgatataccaccaaatcagtcaatctacataaaacatatcaatgagaagatcaagaaagaagagctgaagaggtctctttactgtttgttctctcagtttggaagattacttgatgtggttgcgttaaagactcctaagctccggggacaagcatgggttgtttttactgaagtcaccgctgctagcaacgctgtccgtcagatgcagaactttcctttctatgataagcctatgcggatacaatatgcaaaatcaaagtcagattatgttactaaagccgaagggtcttttgttccaaaagaaaagaagatgaagcaagaagagaaagttgaaaggaagcgacatgctgaagaaactcaacaaccaagcatgcctaatggcgcaactactcagaacggaatgcctgtgcctcctttccagccgagtgggcaagacacgatgccaccaaacaacatactcttcattcataatcttcccattgagacgaatagtatgatgcttcagctgctctttgagcaatacccaggattcaaagagataagaatgatcgaagcaaaacccggaattgcgtttgtggagtatgaagacgatgttcagtcttccatggccatgcaggctcttcagggtttcaagatcactccgcagaatccaatggtcgtctcttttgccaagaagtgaaaaccagagttttgttatgcggatgaatggtaatgatatactaattagtagctgtttaaaagcaaactgtcttattttatttggttcgtttccgattagtggtgtgaatgaccccgaagctttagaccagaatgtaatgagatcgaagaattgagagtgatttggttggagaaaatctcattttaaatgccttatt

SEQ ID NO: 34324 - protein, 229 aa, Arabidopsis thaliana
  misc_feature (1)..(229): Ceres Seq. ID no. 13605884
MLTADIPPNQSIYIKHINEKIKKEELKRSLYCLFSQFGRLLDVVALKTPKLRGQAWVVFTEVTAASNAVRQMQNFPFYDKPMRIQYAKSKSDYVTKAEGSFVPKEKKMKQEEKVERKRHAEETQQPSMPNGATTQNGMPVPPFQPSGQDTMPPNNILFIHNLPIETNSMMLQLLFEQYPGFKEIRMIEAKPGIAFVEYEDDVQSSMAMQALQGFKITPQNPMVVSFAKK

SEQ ID NO: 34325 - protein, 158 aa, Arabidopsis thaliana
  misc_feature (1)..(158): Ceres Seq. ID no. 13605885
MQNFPFYDKPMRIQYAKSKSDYVTKAEGSFVPKEKKMKQEEKVERKRHAEETQQPSMPNGATTQNGMPVPPFQPSGQDTMPPNNILFIHNLPIETNSMMLQLLFEQYPGFKEIRMIEAKPGIAFVEYEDDVQSSMAMQALQGFKITPQNPMVVSFAKK

SEQ ID NO: 34326 - protein, 148 aa, Arabidopsis thaliana
  misc_feature (1)..(148): Ceres Seq. ID no. 13605886
MRIQYAKSKSDYVTKAEGSFVPKEKKMKQEEKVERKRHAEETQQPSMPNGATTQNGMPVPPFQPSGQDTMPPNNILFIHNLPIETNSMMLQLLFEQYPGFKEIRMIEAKPGIAFVEYEDDVQSSMAMQALQGFKITPQNPMVVSFAKK

SEQ ID NO: 34327 - DNA, 1165 bp, Arabidopsis thaliana
  misc_feature (1)..(1165): Ceres Seq. ID no. 13605901
atgacccatattctcttgactcgtgaggttgaaatgtaaatcactttaaaattaaaaacgtaccttgtcagttttgagactcaaaaggacttgaaatattgaaatccctattctttacgcgtactcgagatttttcgctcttgagagaatcacttcgacaatgtcggtaacggctgctttcattgattcggatcaaactcagcacaacattcttatggattcccaatcaactgtctccggtgtgaaaactgtcaagattagcaatgtttcactaattgtttctaagaaagatgtcaaagagttcttttctttctctggtgacattcaatacgtcgagatgcgaagtgagacacaagagagtcaggtcgcatatgttacttttaaggattcacaaggagctgaaactgcaatgctcttaacgggagctgtcattgcagatcttcgtgttagtataactcctgctgttaactatcagctaccaccagaagcccttgcacttgactcggaacattcgtttaatggtttttctgtcaagaaagctgaagatgtggtgaacatcatggtgggaagaggttatgctcttggaaaagacgccatggagaaagccaaagcatttgatgacagacacaacttgatctcaaacgcttctgcaaccattgcatcgcttgacgataagatgggtctgagcgaaaagctaagcataggaacaactgtggttaatgagaagttgagagatatcgatgagcgatatcaggtgagggagataacgaaatctgctttagcagctgctgaagagacagcaatcagtgcaagaacggctttaatggcaaacccttatgtatcaagtggagcttcgtggttttcaaacgcgtttggcgcagtgacaaaggcggttaaagagaaagttgagaatggaggagaaggaagaaaggagatcatcacacttgatccctcttcacccaaagttcctgctgtagttcctgttaagctcggttgatgcagatctcatcaaaccaatcggatctcgactaaattctttgataggtttgttgttcatatatatgctttcgtatgctaaagagaagataaaaagacataaaccatgaaaggtgttgttacattcaaccagcatttgttcctctcttgaaagagattattaagattc

SEQ ID NO: 34328 - protein, 278 aa, Arabidopsis thaliana
  misc_feature (1)..(278): Ceres Seq. ID no. 13605902
MSVTAAFIDSDQTQHNILMDSQSTVSGVKTVKISNVSLIVSKKDVKEFFSFSGDIQYVEMRSETQESQVAYVTFKDSQGAETAMLLTGAVIADLRVSITPAVNYQLPPEALALDSEHSFNGFSVKKAEDVVNIMVGRGYALGKDAMEKAKAFDDRHNLISNASATIASLDDKMGLSEKLSIGTTVVNEKLRDIDERYQVREITKSALAAAEETAISARTALMANPYVSSGASWFSNAFGAVTKAVKEKVENGGEGRKEIITLDPSSPKVPAVVPVKLG

SEQ ID NO: 34329 - protein, 260 aa, Arabidopsis thaliana
  misc_feature (1)..(260): Ceres Seq. ID no. 13605903
MDSQSTVSGVKTVKISNVSLIVSKKDVKEFFSFSGDIQYVEMRSETQESQVAYVTFKDSQGAETAMLLTGAVIADLRVSITPAVNYQLPPEALALDSEHSFNGFSVKKAEDVVNIMVGRGYALGKDAMEKAKAFDDRHNLISNASATIASLDDKMGLSEKLSIGTTVVNEKLRDIDERYQVREITKSALAAAEETAISARTALMANPYVSSGASWFSNAFGAVTKAVKEKVENGGEGRKEIITLDPSSPKVPAVVPVKLG

SEQ ID NO: 34330 - protein, 219 aa, Arabidopsis thaliana
  misc_feature (1)..(219): Ceres Seq. ID no. 13605904
MRSETQESQVAYVTFKDSQGAETAMLLTGAVIADLRVSITPAVNYQLPPEALALDSEHSFNGFSVKKAEDVVNIMVGRGYALGKDAMEKAKAFDDRHNLISNASATIASLDDKMGLSEKLSIGTTVVNEKLRDIDERYQVREITKSALAAAEETAISARTALMANPYVSSGASWFSNAFGAVTKAVKEKVENGGEGRKEIITLDPSSPKVPAVVPVKLG

SEQ ID NO: 34331 - DNA, 764 bp, Arabidopsis thaliana
  misc_feature (1)..(764): Ceres Seq. ID no. 13605917
aaccaaaaatttcttcgtctctgtctccaaaatcgaatcaaaatctctaaagtttcaatttttttgttctgttctttttatttttttaaagaatggcttcaatttctgcaactttgccttcgccattgttactcacacagagaaaatccaatctcacatcgattcaaaaactcccattttctctaactcgaggtacgaatgatctttctccattatctcttactcgaaaccctagcagcatcagtctgatggtgaaagctagtggagaaagctcagattcatcgactgatctcgacgttgttagtacgattcagaatgtttgggataagtctgaagataggttaggtcttattggtttgggttttgctggtattgtagctctttgggcatcattgaatctcatcacggcaatcgacaaattgcccgttatctcgagcggattcgaactagttggtatcttgttctccacgtggttcacatatcgatatctcttgttcaaaccggacagacaggagctttcgaaaattgtcaagaaatcagtagcggatatacttggccagtgaaccttgtgtgtgtgataatacttcatctttggaagatgatttgtttgcaagtttgtaaaattacatgacagggtggttgttgtttctagtccaataatgtcatgcatttgaaacctgtaaatactttattgttggtttttggttgtgagcaaaatcaatcttttctaatttcaaagattctcttttatgattatacgtttt

SEQ ID NO: 34332 - protein, 156 aa, Arabidopsis thaliana
  misc_feature (1)..(156): Ceres Seq. ID no. 13605918
MASISATLPSPLLLTQRKSNLTSIQKLPFSLTRGTNDLSPLSLTRNPSSISLMVKASGESSDSSTDLDVVSTIQNVWDKSEDRLGLIGLGFAGIVALWASLNLITAIDKLPVISSGFELVGILFSTWFTYRYLLFKPDRQELSKIVKKSVADILGQ

SEQ ID NO: 34333 - protein, 104 aa, Arabidopsis thaliana
  misc_feature (1)..(104): Ceres Seq. ID no. 13605919
MVKASGESSDSSTDLDVVSTIQNVWDKSEDRLGLIGLGFAGIVALWASLNLITAIDKLPVISSGFELVGILFSTWFTYRYLLFKPDRQELSKIVKKSVADILGQ

SEQ ID NO: 34334 - DNA, 1611 bp, Arabidopsis thaliana
  misc_feature (1)..(1611): Ceres Seq. ID no. 13605924
atgcacaatcattcccactaatagtttaataaagtgtataatttttttcaaattaaaacagctaaacacacacaaccacattcaaaaaggggttaagcattgaagaatattctaagaaaatttgtttctcttcttacagaagtaaaagcgactctctctctcattaagcatcaaaggagtttcgtttttcttgctttgctgttacattcttcaggaaaaaggcgttacctttactctctctgcatcaacgaggaagcgtgtagagctaaaggagctgaatttgagagatttttttgttttgtttctgggtttgttcaaagatgcaaatttttagttgtttctgctgtggaaaaggatttgatcggcaaaagaaggtgaaaacggagccatcgtggaggatcttttcactcaaggaacttcacgcagcaacaaacagttttaattacgataacaagctcggtgaaggcagatttggcagtgtgtattggggtcagctatgggatggatctcaaattgcagtcaagagattgaaggcatggagtagcagagaagagatagattttgctgtagaagtcgagattcttgctcgtatccgtcacaagaatctattgagtgtacgaggttactgtgcagaaggacaagaacgactcattgtatatgattacatgccaaatttgagcttggtctctcatcttcatggtcaacattcatctgagtcgcttcttgattggactaggcggatgaatattgctgtatcttctgctcaggcgattgcctacttgcatcattttgcaacacctagaatagtccatggagatgtgagagcaagcaatgtgctgctagattctgagtttgaagctcgggttacagatttcggatacgataagctgatgccagatgatggagctaacaaaagcaccaagggtaataacattgggtatctctcaccagaatgtatcgaatctggaaaagaatcagacatgggagatgtgtatagtttcggtgttcttttgctggagcttgtaactggtaagagacctacagagagggtaaacttaacaacaaagaggggtattaccgaatgggttttacctcttgtttacgaaagaaagtttggtgaaattgtggatcaaaggctgaatgggaagtatgtggaagaagagctgaaaaggatagttttggttggtctcatgtgtgctcagagggagtcagagaagagaccaacaatgtctgaagttgtggagatgctaatgattgaatcaaaggagaaaatggctcagcttgaagctaatccactcttcaatggaaacaatgatggtgaagttatagatgaaagctcagagatcatttctgaagtgagagatcatcaataacaagaacaagaatgttattcaaattcacgcattcttgttttcttttgctagaatctggtttttggttgtgcttgtttttagaagagtgtttgtgcttgtttttagaatagcgaagttgggttttaaaagtttattgtgtattttttttcagcttaagattggattttgatcattgatatttgagcttgtaagagagtgtagtggtacatatttggtatttatgagaaagtttttctga

SEQ ID NO: 34335 - protein, 350 aa, Arabidopsis thaliana
  misc_feature (1)..(350): Ceres Seq. ID no. 13605925
MQIFSCFCCGKGFDRQKKVKTEPSWRIFSLKELHAATNSFNYDNKLGEGRFGSVYWGQLWDGSQIAVKRLKAWSSREEIDFAVEVEILARIRHKNLLSVRGYCAEGQERLIVYDYMPNLSLVSHLHGQHSSESLLDWTRRMNIAVSSAQAIAYLHHFATPRIVHGDVRASNVLLDSEFEARVTDFGYDKLMPDDGANKSTKGNNIGYLSPECIESGKESDMGDVYSFGVLLLELVTGKRPTERVNLTTKRGITEWVLPLVYERKFGEIVDQRLNGKYVEEELKRIVLVGLMCAQRESEKRPTMSEVVEMLMIESKEKMAQLEANPLFNGNNDGEVIDESSEIISEVRDHQ

SEQ ID NO: 34336 - protein, 235 aa, Arabidopsis thaliana
  misc_feature (1)..(235): Ceres Seq. ID no. 13605926
MPNLSLVSHLHGQHSSESLLDWTRRMNIAVSSAQAIAYLHHFATPRIVHGDVRASNVLLDSEFEARVTDFGYDKLMPDDGANKSTKGNNIGYLSPECIESGKESDMGDVYSFGVLLLELVTGKRPTERVNLTTKRGITEWVLPLVYERKFGEIVDQRLNGKYVEEELKRIVLVGLMCAQRESEKRPTMSEVVEMLMIESKEKMAQLEANPLFNGNNDGEVIDESSEIISEVRDHQ

SEQ ID NO: 34337 - protein, 210 aa, Arabidopsis thaliana
  misc_feature (1)..(210): Ceres Seq. ID no. 13605927
MNIAVSSAQAIAYLHHFATPRIVHGDVRASNVLLDSEFEARVTDFGYDKLMPDDGANKSTKGNNIGYLSPECIESGKESDMGDVYSFGVLLLELVTGKRPTERVNLTTKRGITEWVLPLVYERKFGEIVDQRLNGKYVEEELKRIVLVGLMCAQRESEKRPTMSEVVEMLMIESKEKMAQLEANPLFNGNNDGEVIDESSEIISEVRDHQ

SEQ ID NO: 34338 - DNA, 586 bp, Arabidopsis thaliana
  misc_feature (1)..(586): Ceres Seq. ID no. 13605936
attgtgttttattttacactcgttcgtcttcgtctagagagagatggcgacggcgtcgtttaggtggattctgcagcttcacagagacgtaccaaaagctgctcgattctatgctcaaggtctcgacttttccgtcaatgtcgtcactttacgctgggctgagctccattctggtcctatcaagctagctcttatgcaatctcctagcaatcatgttgctgagaagggatactcatcgcttctatcgttcacagtcactgacattaatacaacagtgactaaacttatggctttaggagctgaattagatggcactatcaagtatgagatacatggaaaggttgcggctatgaaatgccctgatggttacatgttaggcctttatgaggctgcatgagcaaatgaatagaattgaagcctgaaaggaagccaattatgcatagagtagatttgtttagagatcatatccataatctctttgaagctattgtatacttcttagaaacctaagccactattatactttatattggttcatgtttaacttgctcttcacattgtttctctagtaagcttttctcaagcc

SEQ ID NO: 34339 - protein, 117 aa, Arabidopsis thaliana
  misc_feature (1)..(117): Ceres Seq. ID no. 13605937
MATASFRWILQLHRDVPKAARFYAQGLDFSVNVVTLRWAELHSGPIKLALMQSPSNHVAEKGYSSLLSFTVTDINTTVTKLMALGAELDGTIKYEIHGKVAAMKCPDGYMLGLYEAA

SEQ ID NO: 34340 - protein, 67 aa, Arabidopsis thaliana
  misc_feature (1)..(67): Ceres Seq. ID no. 13605938
MQSPSNHVAEKGYSSLLSFTVTDINTTVTKLMALGAELDGTIKYEIHGKVAAMKCPDGYMLGLYEAA

SEQ ID NO: 34341 - protein, 61 aa, Arabidopsis thaliana
  misc_feature (1)..(61): Ceres Seq. ID no. 13605939
CVLFYTRSSSSRERWRRRRLGGFCSFTETYQKLLDSMLKVSTFPSMSSLYAGLSSILVLSS

SEQ ID NO: 34342 - DNA, 1686 bp, Arabidopsis thaliana
  misc_feature (1)..(1686): Ceres Seq. ID no. 13605951
cctcttctttctcagacgcttcaactcaaaaagagaaaccagcatagttgtaatcttgaggatcagctatttttctgaaggatatttggcctaatttcgaaactcaaggtacttaggaaacgctgtagaagatggctattgtgtcgttgcgcgatgtggccatggtgatggtgacagtgcaggtgtttgcacgagggtatccggaaacagatttggttgtgaggcttcctggtcaaccaaaggttgtattcagacagtacgcagggtatgttgatctcgacttgaatgctggccgtagccttttctactacttcgtggaagctgaaaaacaccctgacacaaaaccgttaaccttgtggctcaatggaggtccaggttgttcttctgttggtggaggagctttcactgagctaggtccattttaccccacaggatatgggcgtggtcttcgcattaactccatgtcgtggaacaaagcctcaaacctgctatttgtggactcaccggctggagttggttggtcttactccaaccgaagctctgattacaacgctggggacaagtctgcggccagcgatatgctcgtgttcttgttgagatggttcgataagttcccggagttgaagtctcacgatctctttctcactggcgaaagctatgcaggacattacatacctcaactggctgatgcgattctcagctataactcacgctcaagtgggttcaaattcaacatcaaaggcattgcaatagggaatccacttctgaagcttgacagggacattccagctgtatacgagttcttctggtcgcatggcatgatctctgaggtagtgggacgtacaatcaagattcaatgtgacttctcacattacacatatgcatacccccataacgtaagtgatgcctgcaacgatgctatccgtgaagccggagacatcaccactgagtatgtcaatacctttgatgttctccctgacctatgctacccatctattgccctgcaagagctaaggcttaaacaaatggctactaagatgagcatgggagtggatgtgtgtatgaactacgaaagacagttctacctaaatatcccagaggtacagatggctcttcacgcaaaccgcacaaacctgccttattcatggtctttgtgcagcaacctgttaaactactctgccatcgatgtaaacaccaacatgcttccgactctgaagagaattatacagaacaaaattcctgttaggatcttcagtggagatcaagattctgtagttccatttctgggaacacgaactatcgtaggagaactcgccaacgatctcaatttcaagacgacagttccatatggagtgtggttccacaaaagacaggttggaggctgggccatcgagtatggaaacctactaacttttgcaacagtgagaggagcggctcatgcggtggcgtacacgcagccctcacgagctctgcatctattcagcacctttcttcgtgggcagagattgcccaacaagacagatattgctatgcatgactgaaagagaaggaatctcattattagagtacatatccttgggaacatataagggattgtgttgagacatattttcatatgattactagtaacaaaacccgtctggtttaatgatgtaaacgacacataatctccactcacaatcgttg

SEQ ID NO: 34343 - protein, 469 aa, Arabidopsis thaliana
  misc_feature (1)..(469): Ceres Seq. ID no. 13605952
MAIVSLRDVAMVMVTVQVFARGYPETDLVVRLPGQPKVVFRQYAGYVDLDLNAGRSLFYYFVEAEKHPDTKPLTLWLNGGPGCSSVGGGAFTELGPFYPTGYGRGLRINSMSWNKASNLLFVDSPAGVGWSYSNRSSDYNAGDKSAASDMLVFLLRWFDKFPELKSHDLFLTGESYAGHYIPQLADAILSYNSRSSGFKFNIKGIAIGNPLLKLDRDIPAVYEFFWSHGMISEVVGRTIKIQCDFSHYTYAYPHNVSDACNDAIREAGDITTEYVNTFDVLPDLCYPSIALQELRLKQMATKMSMGVDVCMNYERQFYLNIPEVQMALHANRTNLPYSWSLCSNLLNYSAIDVNTNMLPTLKRIIQNKIPVRIFSGDQDSVVPFLGTRTIVGELANDLNFKTTVPYGVWFHKRQVGGWAIEYGNLLTFATVRGAAHAVAYTQPSRALHLFSTFLRGQRLPNKTDIAMHD

SEQ ID NO: 34344 - protein, 459 aa, Arabidopsis thaliana
  misc_feature (1)..(459): Ceres Seq. ID no. 13605953
MVMVTVQVFARGYPETDLVVRLPGQPKVVFRQYAGYVDLDLNAGRSLFYYFVEAEKHPDTKPLTLWLNGGPGCSSVGGGAFTELGPFYPTGYGRGLRINSMSWNKASNLLFVDSPAGVGWSYSNRSSDYNAGDKSAASDMLVFLLRWFDKFPELKSHDLFLTGESYAGHYIPQLADAILSYNSRSSGFKFNIKGIAIGNPLLKLDRDIPAVYEFFWSHGMISEVVGRTIKIQCDFSHYTYAYPHNVSDACNDAIREAGDITTEYVNTFDVLPDLCYPSIALQELRLKQMATKMSMGVDVCMNYERQFYLNIPEVQMALHANRTNLPYSWSLCSNLLNYSAIDVNTNMLPTLKRIIQNKIPVRIFSGDQDSVVPFLGTRTIVGELANDLNFKTTVPYGVWFHKRQVGGWAIEYGNLLTFATVRGAAHAVAYTQPSRALHLFSTFLRGQRLPNKTDIAMHD

SEQ ID NO: 34345 - protein, 457 aa, Arabidopsis thaliana
  misc_feature (1)..(457): Ceres Seq. ID no. 13605954
MVTVQVFARGYPETDLVVRLPGQPKVVFRQYAGYVDLDLNAGRSLFYYFVEAEKHPDTKPLTLWLNGGPGCSSVGGGAFTELGPFYPTGYGRGLRINSMSWNKASNLLFVDSPAGVGWSYSNRSSDYNAGDKSAASDMLVFLLRWFDKFPELKSHDLFLTGESYAGHYIPQLADAILSYNSRSSGFKFNIKGIAIGNPLLKLDRDIPAVYEFFWSHGMISEVVGRTIKIQCDFSHYTYAYPHNVSDACNDAIREAGDITTEYVNTFDVLPDLCYPSIALQELRLKQMATKMSMGVDVCMNYERQFYLNIPEVQMALHANRTNLPYSWSLCSNLLNYSAIDVNTNMLPTLKRIIQNKIPVRIFSGDQDSVVPFLGTRTIVGELANDLNFKTTVPYGVWFHKRQVGGWAIEYGNLLTFATVRGAAHAVAYTQPSRALHLFSTFLRGQRLPNKTDIAMHD

SEQ ID NO: 34346 - DNA, 2843 bp, Arabidopsis thaliana
  misc_feature (1)..(2843): Ceres Seq. ID no. 13605983
tttctttaacatcattatacaaagttacaacaacttgaaaaaattaattatataagcccattaaatcttgtatcataagcccagcccaaagttataaacttttcaaaatgcaaggagctaaaaaacaagttggttttgttggtttcaaatcaaaccaaaccgtttttttaagattacgaatcgaatggtttatttttgctaaatcggttcggttttttctccagacctattagtaaacctcttgcttcgattaggcggtcgtctctctgaaattttctgaaacctcttaaaccctagcaatgccgtcgagtttcttctttgaggatgctagtgacgacgagctcgaattaatacgcaatcaagaggacagtagtgaggaagacgtaaaggaaggcgaagcagaagagcatgaagctggagaagacgaagatggagaagaggaatatgaagaagaagatgacgacgaagaagaagaagatgagaagcggaaacgagatgctgatgctcaatctccttgggattttgcatcttactcaagctccgttggtgaagaacacgcccgccgtcacacaacgtctattgatgaaaagatctctaaagctattcagcatcgtccagttcccatttcaataaatgaagaagaagaagaggaagaagaagaagaagatgcctccgatgctgaaactgacaaacaagaggagtatctttcggaagacgatgaggcagctgagtacaaaccagaagatgctactcccaagccgttcttctctacagtggatggagtttcatttcatgctgatactttcatggagcttaatctctctcgtccattgcttcgagcttgtgaaactctcggatacaagaaacctactccgattcaggcagcttgtatacctttagcacttacagggcgtgatctttgtgccagtgccatcactgggtcagggaagactgctgcattcgctttacctactcttgagaggttgctgttccgtcccaagcgggtctttgctactagagttcttattctcactccgactagggagttggccgtccagattcacagtatgattcagaatcttgcacagtttactgatatcaagtgtggattgattgtaggagggctttctgtaagggagcaagaggtggttctgaggtctatgccagatattgttgtggcgactcctggacgtatgatagatcatttgcgtaattctatgtctgttgatttggatgatctagcggttttaatccttgatgaggcagaccgccttctacagactgggtttgccactgaaatcacagagctggttcgcttatgtcccaagagaaggcaaacaatgctcttctcagccacaatgactgaagaagttaaagagctagtcaaactttccttgaacaaaccgttgcggctctcagctgatccatcagctagaaggccaccaggcttgactgaggaggtggtaagaatacgcaggactcgtgaggcaaatcaggaagctgttcttctatcattgtgcacaaggacttttaaatcaaaagtcattatctttagtggaacaaaacaagctgcacatagactgaaaattttattcggattagctggcctcaaagcagctgagcttcatggaaacctaactcaagcacaacgtcttgattctctggagcttttcagaaagcaggaggtcgattttctcattgctaccgatgtagccgctcgaggacttgacatcattggtgttcaaacagttataaattatgcttgtcctcgggaaatagacagttatgttcacagagttggtagaacagctagggctggaagggaaggttatgctgtaacgtttgtgactgatagtgaccgatcccttttgaaagtcattgcaaagaaggtgggttcaaagttgaagagccgagtcatcccagagcagtcaatcgtcaagtggtctcagataatcgatgaaatggaagatcaatattccgctgttatttcagcagagagggatgagcgagctctaaggaaagctgaaatggaatttgcaaaggcggagaacatgcttgagcacagagatgaaatatatgcacgcccaaaaaggacttggttcatgacagagaaggagaagaagctcgtggcacaggctgaaaaggattctgcagggaaccctgctggaggcgaactagttagtgctgatagagcagaggacctcaagatgaaggagaagagaaaacgtgaacgcgagaagaatcttcctaggaaaaaacgtagaaagctagaagctgccagagagatgctagaagataacgaaggagaagaagaggaagaagacgaagaaggagacgaaaagagaggaagatcaagagggaaagacaagaaaaaacaggagacagataagaagggattgacactaaaggatcttggttacatgagagcaaaagcggtgaaagcaaaacagagagcaattgattccggtaagatggagagaccaaagccggacaagaaacaaagccggagtaaaccaagaaaccagcctcgtggtgaagagatgaaagatctgttcaagagtgatatgggcgagaagaaacagggcagaggcggtgccgcggctgcagcaaaacctcggacgaagtcgaagaactcattcaagagcaaagccagatataagcgtaggtaaaaggaaaaagcatttttgagaagatatcgaaggacaaacccacgagaagaaggacatttcattgagaagggtttaaacaatttaaattattgttgtaatatcataatttagaacaaaactggttaagatgttcgaaattttgttttctttgtcctatggtttttataatctttc

SEQ ID NO: 34347 - protein, 789 aa, Arabidopsis thaliana
  misc_feature (1)..(789): Ceres Seq. ID no. 13605984
MPSSFFFEDASDDELELIRNQEDSSEEDVKEGEAEEHEAGEDEDGEEEYEEEDDDEEEEDEKRKRDADAQSPWDFASYSSSVGEEHARRHTTSIDEKISKAIQHRPVPISINEEEEEEEEEEDASDAETDKQEEYLSEDDEAAEYKPEDATPKPFFSTVDGVSFHADTFMELNLSRPLLRACETLGYKKPTPIQAACIPLALTGRDLCASAITGSGKTAAFALPTLERLLFRPKRVFATRVLILTPTRELAVQIHSMIQNLAQFTDIKCGLIVGGLSVREQEVVLRSMPDIVVATPGRMIDHLRNSMSVDLDDLAVLILDEADRLLQTGFATEITELVRLCPKRRQTMLFSATMTEEVKELVKLSLNKPLRLSADPSARRPPGLTEEVVRIRRTREANQEAVLLSLCTRTFKSKVIIFSGTKQAAHRLKILFGLAGLKAAELHGNLTQAQRLDSLELFRKQEVDFLIATDVAARGLDIIGVQTVINYACPREIDSYVHRVGRTARAGREGYAVTFVTDSDRSLLKVIAKKVGSKLKSRVIPEQSIVKWSQIIDEMEDQYSAVISAERDERALRKAEMEFAKAENMLEHRDEIYARPKRTWFMTEKEKKLVAQAEKDSAGNPAGGELVSADRAEDLKMKEKRKREREKNLPRKKRRKLEAAREMLEDNEGEEEEEDEEGDEKRGRSRGKDKKKQETDKKGLTLKDLGYMRAKAVKAKQRAIDSGKMERPKPDKKQSRSKPRNQPRGEEMKDLFKSDMGEKKQGRGGAAAAAKPRTKSKNSFKSKARYKRR

SEQ ID NO: 34348 - protein, 620 aa, Arabidopsis thaliana
  misc_feature (1)..(620): Ceres Seq. ID no. 13605985
MELNLSRPLLRACETLGYKKPTPIQAACIPLALTGRDLCASAITGSGKTAAFALPTLERLLFRPKRVFATRVLILTPTRELAVQIHSMIQNLAQFTDIKCGLIVGGLSVREQEVVLRSMPDIVVATPGRMIDHLRNSMSVDLDDLAVLILDEADRLLQTGFATEITELVRLCPKRRQTMLFSATMTEEVKELVKLSLNKPLRLSADPSARRPPGLTEEVVRIRRTREANQEAVLLSLCTRTFKSKVIIFSGTKQAAHRLKILFGLAGLKAAELHGNLTQAQRLDSLELFRKQEVDFLIATDVAARGLDIIGVQTVINYACPREIDSYVHRVGRTARAGREGYAVTFVTDSDRSLLKVIAKKVGSKLKSRVIPEQSIVKWSQIIDEMEDQYSAVISAERDERALRKAEMEFAKAENMLEHRDEIYARPKRTWFMTEKEKKLVAQAEKDSAGNPAGGELVSADRAEDLKMKEKRKREREKNLPRKKRRKLEAAREMLEDNEGEEEEEDEEGDEKRGRSRGKDKKKQETDKKGLTLKDLGYMRAKAVKAKQRAIDSGKMERPKPDKKQSRSKPRNQPRGEEMKDLFKSDMGEKKQGRGGAAAAAKPRTKSKNSFKSKARYKRR

SEQ ID NO: 34349 - protein, 533 aa, Arabidopsis thaliana
  misc_feature (1)..(533): Ceres Seq. ID no. 13605986
MIQNLAQFTDIKCGLIVGGLSVREQEVVLRSMPDIVVATPGRMIDHLRNSMSVDLDDLAVLILDEADRLLQTGFATEITELVRLCPKRRQTMLFSATMTEEVKELVKLSLNKPLRLSADPSARRPPGLTEEVVRIRRTREANQEAVLLSLCTRTFKSKVIIFSGTKQAAHRLKILFGLAGLKAAELHGNLTQAQRLDSLELFRKQEVDFLIATDVAARGLDIIGVQTVINYACPREIDSYVHRVGRTARAGREGYAVTFVTDSDRSLLKVIAKKVGSKLKSRVIPEQSIVKWSQIIDEMEDQYSAVISAERDERALRKAEMEFAKAENMLEHRDEIYARPKRTWFMTEKEKKLVAQAEKDSAGNPAGGELVSADRAEDLKMKEKRKREREKNLPRKKRRKLEAAREMLEDNEGEEEEEDEEGDEKRGRSRGKDKKKQETDKKGLTLKDLGYMRAKAVKAKQRAIDSGKMERPKPDKKQSRSKPRNQPRGEEMKDLFKSDMGEKKQGRGGAAAAAKPRTKSKNSFKSKARYKRR

SEQ ID NO: 34350 - DNA, 1076 bp, Arabidopsis thaliana
  misc_feature (1)..(1076): Ceres Seq. ID no. 13605987
atcttctatctctcaaaagaaaagcagacaactttatttgcaaaaacagagtttttttttcttatcttgagaaagttcaacagaagatgatgttcgagaaagacgatctgggtctaagcttaggcttgaattttccaaagaaacagatcaatctcaaatcaaatccatctgtttctgttactccttcttcttcttcttttggattattcagaagatcttcatggaacgagagttttacttcttcagttccaaactcagattcgtcacaaaaagaaacaagaactttcatccgaggaatcgacgtgaacagaccaccgtctacagcggaatacggcgacgaagacgctggagtatcttcacctaacagtacagtctcaagctctacagggaaaagaagcgagagagaagaagacacagatccacaaggctcaagaggaatcagtgacgatgaagatggtgataactccaggaaaaagcttagactttccaaagatcaatctgctattcttgaagagaccttcaaagatcacagtactctcaatccgaagcagaagcaagcattggctaaacaattagggttacgagcaagacaagtggaagtttggtttcagaacagacgagcaagaacaaagctgaagcaaacggaggtagactgcgagttcttacggagatgctgcgagaatctaacggaagagaaccgtcggctacaaaaagaagtaacggaattgagagcacttaagctctctcctcagttctacatgcacatgagcccacccactactttgaccatgtgcccttcatgtgaacacgtgtcggtcccgccaccacaacctcaggctgctacgtcagcgcaccaccggtcgttgccggtcaatgcgtgggctcctgcgacgaggatatctcacggcttgacttttgacgctcttcgtcctaggtcctaagtctttttacttgcaaccaaagggcattttggtcgttttttaagtttcatggaccagatatgcatgtagttgttaacatgtatgtattttcttagaaagaaagaaaaacagattaatatttttctagcttaaacc

SEQ ID NO: 34351 - protein, 312 aa, Arabidopsis thaliana
  misc_feature (1)..(312): Ceres Seq. ID no. 13605988
LLSLKRKADNFICKNRVFFSYLEKVQQKMMFEKDDLGLSLGLNFPKKQINLKSNPSVSVTPSSSSFGLFRRSSWNESFTSSVPNSDSSQKETRTFIRGIDVNRPPSTAEYGDEDAGVSSPNSTVSSSTGKRSEREEDTDPQGSRGISDDEDGDNSRKKLRLSKDQSAILEETFKDHSTLNPKQKQALAKQLGLRARQVEVWFQNRRARTKLKQTEVDCEFLRRCCENLTEENRRLQKEVTELRALKLSPQFYMHMSPPTTLTMCPSCEHVSVPPPQPQAATSAHHRSLPVNAWAPATRISHGLTFDALRPRS

SEQ ID NO: 34352 - protein, 284 aa, Arabidopsis thaliana
  misc_feature (1)..(284): Ceres Seq. ID no. 13605989
MMFEKDDLGLSLGLNFPKKQINLKSNPSVSVTPSSSSFGLFRRSSWNESFTSSVPNSDSSQKETRTFIRGIDVNRPPSTAEYGDEDAGVSSPNSTVSSSTGKRSEREEDTDPQGSRGISDDEDGDNSRKKLRLSKDQSAILEETFKDHSTLNPKQKQALAKQLGLRARQVEVWFQNRRARTKLKQTEVDCEFLRRCCENLTEENRRLQKEVTELRALKLSPQFYMHMSPPTTLTMCPSCEHVSVPPPQPQAATSAHHRSLPVNAWAPATRISHGLTFDALRPRS

SEQ ID NO: 34353 - protein, 283 aa, Arabidopsis thaliana
  misc_feature (1)..(283): Ceres Seq. ID no. 13605990
MFEKDDLGLSLGLNFPKKQINLKSNPSVSVTPSSSSFGLFRRSSWNESFTSSVPNSDSSQKETRTFIRGIDVNRPPSTAEYGDEDAGVSSPNSTVSSSTGKRSEREEDTDPQGSRGISDDEDGDNSRKKLRLSKDQSAILEETFKDHSTLNPKQKQALAKQLGLRARQVEVWFQNRRARTKLKQTEVDCEFLRRCCENLTEENRRLQKEVTELRALKLSPQFYMHMSPPTTLTMCPSCEHVSVPPPQPQAATSAHHRSLPVNAWAPATRISHGLTFDALRPRS

SEQ ID NO: 34354 - DNA, 2658 bp, Arabidopsis thaliana
  misc_feature (1)..(2658): Ceres Seq. ID no. 13606003
gaagagaatccgatgcgtagaagactatcttccgtgctaatcaacaatcagtgcatcgcgtcccaacgccattaccacacatctcgacctgagaaacccacaaagaaagccagcagccatgaaccaactcacaaattcaccaggaagccatgggaggaagtgccatttctcaccgatctcaaagaaatcgaagacccagaggaagctctttctctcttccaccaataccaggaaatgggtttccgacacgactacccatcttactcttctctcatctacaagcttgcaaagtcccgtaacttcgacgccgtcgaccaaattctccgccttgttcgctatcgaaacgtccggtgcagagaatccctcttcatgggattgattcagcattacgggaaagccggttcggtcgacaaagccatcgatgttttccacaaaatcacctcctttgattgtgttcgcacgattcagtctctcaacactctcatcaacgttctggtcgataacggcgagttggaaaaggccaaaagctttttcgacggggcaaaggatatgcgtttgcgtcccaattcggtgtctttcaatattttgatcaaaggatttcttgataaatgcgattgggaagctgcatgtaaggtgttcgacgaaatgcttgagatggaggtgcaaccgagtgttgtgacatacaatagcctgattggtttcttatgccgaaatgacgatatgggtaaggcgaagagcttgcttgaagatatgattaagaaaagaatacgtccgaatgctgtgacatttgggttgttaatgaaaggtttatgttgtaagggagagtacaatgaagcaaagaagttgatgttcgatatggagtatcgtgggtgtaaaccgggtctcgttaactacggaattttgatgagtgatcttgggaagagagggagaattgatgaggcaaagcttctactcggcgagatgaagaaaagacggataaaaccagatgttgtgatctataacattctggtaaaccatctttgcactgagtgtagagtccctgaggcttatagagtgctgacggaaatgcagatgaaagggtgtaaaccaaatgcagctacataccgtatgatgattgatgggttttgtcgtatcgaggattttgattcagggttgaatgttttgaatgcaatgcttgcaagcagacactgtcccacacctgcaacgtttgtatgtatggttgctgggctgattaaaggcggtaacttggaccatgcttgctttgtgttagaggtgatgggaaagaaaaacttaagttttgggtctggtgcttggcaaaatctactttctgatctctgcatcaaggatggaggagtatattgtgaggctttgtcagaagtaatttccatctaagcaatgacctttttaaaggctgcaaagtactcttcttcctgattttagctctcgccattacttttgtctcagctgctcggcttcttgatgaagaagaagatattgggttggtccctttgcctaccacgagtcctggtcctttaccaacagttggttttaggcccctttcccactgctaattcaggccctgcaactggtatcgcttcaggtacaggttcagcctcagggggtttaggttccttgggtaccaatactggccccgggcctctatcgaccactggttctagtcttttaccagttgctagttcgggtaccttgcctgttactggccccggtcctctaccaaccagttctggtctcttaccgggtgctagttcgggtaacttgcctggttcaggttcagggcctttgcctactgttggttcaggtgctgcagctacgggtctgggcgcaggtgcagggtcagtgattggtggttcagttcctgacaacactttggttttcttcatgcacgatatactcggtggctcaaacccgacagcgagggctgtgactggagtcgtcgcaaacgcagccctcagtggccaaattccattcgctaagcccaatggtgcaaacctccctgttagtaacggcgttccatcagacaataacaacaatggaatcctgaacaataacaacgtcccacttctcgtcgggcttggcggaaccacttccaacattctacagaacaatggaaacaacatgttgaacggtcttcccgtggctaacggcggccagctcccatcgggttcgtctcttcagatgctcatgtttgggacattgacggtgatggacaacgaactaaccgaaggacacgaactcgggtctggtctgctgggtaaagcccaaggcttctacgtggcaagtgcccttgatgggaccagccagactatggctttcacggctatgtttgagagcggtggatatgaagatagcatcagtttcttcggtgtgcatagaacagctgcatcggaatctcatcttggggtaatgggcggtactggtaagtatgtgaatgcgagaggcttcgcaattgtcaagacttttacgggttcctccgggacccagcagcagcagccgcaccagttcacagatgggctcgagactgttctggagtgcaccgtttatctttcttactagtttcttttccctcttctcttatcttttttgtctaccaagaaaacgtgaaaacctattaatttgacaaccaatcccttgttattc

SEQ ID NO: 34355 - protein, 463 aa, Arabidopsis thaliana
  misc_feature (1)..(463): Ceres Seq. ID no. 13606004
EENPMRRRLSSVLINNQCIASQRHYHTSRPEKPTKKASSHEPTHKFTRKPWEEVPFLTDLKEIEDPEEALSLFHQYQEMGFRHDYPSYSSLIYKLAKSRNFDAVDQILRLVRYRNVRCRESLFMGLIQHYGKAGSVDKAIDVFHKITSFDCVRTIQSLNTLINVLVDNGELEKAKSFFDGAKDMRLRPNSVSFNILIKGFLDKCDWEAACKVFDEMLEMEVQPSVVTYNSLIGFLCRNDDMGKAKSLLEDMIKKRIRPNAVTFGLLMKGLCCKGEYNEAKKLMFDMEYRGCKPGLVNYGILMSDLGKRGRIDEAKLLLGEMKKRRIKPDVVIYNILVNHLCTECRVPEAYRVLTEMQMKGCKPNAATYRMMIDGFCRIEDFDSGLNVLNAMLASRHCPTPATFVCMVAGLIKGGNLDHACFVLEVMGKKNLSFGSGAWQNLLSDLCIKDGGVYCEALSEVISI

SEQ ID NO: 34356 - protein, 459 aa, Arabidopsis thaliana
  misc_feature (1)..(459): Ceres Seq. ID no. 13606005
MRRRLSSVLINNQCIASQRHYHTSRPEKPTKKASSHEPTHKFTRKPWEEVPFLTDLKEIEDPEEALSLFHQYQEMGFRHDYPSYSSLIYKLAKSRNFDAVDQILRLVRYRNVRCRESLFMGLIQHYGKAGSVDKAIDVFHKITSFDCVRTIQSLNTLINVLVDNGELEKAKSFFDGAKDMRLRPNSVSFNILIKGFLDKCDWEAACKVFDEMLEMEVQPSVVTYNSLIGFLCRNDDMGKAKSLLEDMIKKRIRPNAVTFGLLMKGLCCKGEYNEAKKLMFDMEYRGCKPGLVNYGILMSDLGKRGRIDEAKLLLGEMKKRRIKPDVVIYNILVNHLCTECRVPEAYRVLTEMQMKGCKPNAATYRMMIDGFCRIEDFDSGLNVLNAMLASRHCPTPATFVCMVAGLIKGGNLDHACFVLEVMGKKNLSFGSGAWQNLLSDLCIKDGGVYCEALSEVISI

SEQ ID NO: 34357 - protein, 385 aa, Arabidopsis thaliana
  misc_feature (1)..(385): Ceres Seq. ID no. 13606006
MGFRHDYPSYSSLIYKLAKSRNFDAVDQILRLVRYRNVRCRESLFMGLIQHYGKAGSVDKAIDVFHKITSFDCVRTIQSLNTLINVLVDNGELEKAKSFFDGAKDMRLRPNSVSFNILIKGFLDKCDWEAACKVFDEMLEMEVQPSVVTYNSLIGFLCRNDDMGKAKSLLEDMIKKRIRPNAVTFGLLMKGLCCKGEYNEAKKLMFDMEYRGCKPGLVNYGILMSDLGKRGRIDEAKLLLGEMKKRRIKPDVVIYNILVNHLCTECRVPEAYRVLTEMQMKGCKPNAATYRMMIDGFCRIEDFDSGLNVLNAMLASRHCPTPATFVCMVAGLIKGGNLDHACFVLEVMGKKNLSFGSGAWQNLLSDLCIKDGGVYCEALSEVISI

SEQ ID NO: 34358 - DNA, 591 bp, Arabidopsis thaliana
  misc_feature (1)..(591): Ceres Seq. ID no. 13606007
atggcgaatgagagtaataatcttggactcgaaatcaccgaactacggctaggtcttcccggagatatcgtcgtctccggtgagtccatctccgggaagaagagggcttctccggaagtagagattgatttgaaatgtgaaccggcgaaaaagagtcaagttgtgggttggccaccggtttgttcgtaccggagaaagaacagtctcgaacggaccaaaagttcgtacgtgaaagtgagtgtagatggagctgcatttttaaggaagattgatttggaaatgtacaaatgttaccaagatcttgcttccgctctgcaaattctgttcggatgctatatcaattttgatgatacgttgaaggaaagtgaatgtgtaccaatatatgaagacaaagatggagattggatgcttgctggagatgttccttgggaaatgttccttggatcgtgcaagaggttaaggattatgaagagatcatgtaacagaggatgaatgatatttatagtcacatgtgaatgtgagtgagccttacagatatctaaatatacatttttgcagttactcaatatttctcttcggaagtctaagatt

SEQ ID NO: 34359 - protein, 163 aa, Arabidopsis thaliana
  misc_feature (1)..(163): Ceres Seq. ID no. 13606008
MANESNNLGLEITELRLGLPGDIVVSGESISGKKRASPEVEIDLKCEPAKKSQVVGWPPVCSYRRKNSLERTKSSYVKVSVDGAAFLRKIDLEMYKCYQDLASALQILFGCYINFDDTLKESECVPIYEDKDGDWMLAGDVPWEMFLGSCKRLRIMKRSCNRG

SEQ ID NO: 34360 - DNA, 1757 bp, Arabidopsis thaliana
  misc_feature (1)..(1757): Ceres Seq. ID no. 13606009
gtctccatcgctcgtttgtttcttcttcagccatatcggaaaaaacgatatccgacgagccattcggtgtttgttccgagaagctccgatcgatctgtgttagggtttttctttttccgccttatgaatctctctatcgcggtttcattagattcagtttaactcgagtgatgaaaccaatctccgtgctagagctctttgatcccgtggctggtaggatattacggcgtttgtagctctgtcgtcgtggatagagttagaacgacgaaatcagccttggtttcctaactgttatttggcatttcagtatctgaatttttgcaacaatgtctgagctaaaagagcgcctgcttcctccaagacctgcttcagctatgaacctcagagatgcttctgtgactcggccttctgcttctggaagaccaccccttcttggagttgatgtcttgggtctgaagaagcgtggacaaggcctacgctcttggattcgtgttgatacttctggtaatactcaggtcatggaggttgacaagttcactatgatgcgtaggtgtgacttacccgcccgtgatttaaggctgcttgatcccttattcgtgtatccctctactatcctaggccgagagaaggctattgttgtcaacttagagcagatccgttgtattattactgcagacgaagttctgcttctgaattcccttgacaactacgtgctgcgctatgttgttgagttgcagcagagactaaagactagtagtgtaggtgagatgtggcagcaggaaaattcccagttgagtaggaggaggagcaggagttttgacaatgcttttgagaattcatcccctgattatttacctttcgagtttagagctcttgaaatagcccttgaagctgcttgtacgtttctcgattcccaggcttcagagttggagattgaggcatacccgttattagatgagcttacctcaaagatcagtacactaaacttggagcgtgtgcgtagactaaagagcaggcttgtagcactgacaagaagagttcagaaggttcgggatgagatcgagcagctaatggatgatgatggagatatggcagaaatgtatctaacagagaagaagaggagaatggaaggatctatgtacggtgaccagtccttattgggttacaggtcaaatgatggtctatctgtttctgcaccggtgtctcctgtttcttctccacctgattcccgaagacttgataaaagcttgagcattgcgaggagtcggcatgacagtgcaaggagttctgaaggtgcagagaatatagaagagctagagatgttgctggaagcttactttgtcgtcattgatagtactctaaacaagttgacatcgttaaaggagtacattgatgacactgaagatttcattaacattcaactggataatgtgcggaatcagctgatccagttcgagttgcttctgacgactgcaacgtttgttgtagccatatttggggtcgttgctgggatctttgggatgaactttgagatagacttcttcaatcagccaggtgcattcagatgggtactcataattactggagtatgtggctttgtgatattttcggcattcgtctggttcttcaagtacagaagactcatgcctctataagaagagagacatgaatgtgctccccagaaagtagacatcaacttatattgttatgttgcttacagatattaatgatttgtttcctttacacaatggaatctt

SEQ ID NO: 34361 - protein, 442 aa, Arabidopsis thaliana
  misc_feature (1)..(442): Ceres Seq. ID no. 13606010
MSELKERLLPPRPASAMNLRDASVTRPSASGRPPLLGVDVLGLKKRGQGLRSWIRVDTSGNTQVMEVDKFTMMRRCDLPARDLRLLDPLFVYPSTILGREKAIVVNLEQIRCIITADEVLLLNSLDNYVLRYVVELQQRLKTSSVGEMWQQENSQLSRRRSRSFDNAFENSSPDYLPFEFRALEIALEAACTFLDSQASELEIEAYPLLDELTSKISTLNLERVRRLKSRLVALTRRVQKVRDEIEQLMDDDGDMAEMYLTEKKRRMEGSMYGDQSLLGYRSNDGLSVSAPVSPVSSPPDSRRLDKSLSIARSRHDSARSSEGAENIEELEMLLEAYFVVIDSTLNKLTSLKEYIDDTEDFINIQLDNVRNQLIQFELLLTTATFVVAIFGVVAGIFGMNFEIDFFNQPGAFRWVLIITGVCGFVIFSAFVWFFKYRRLMPL

SEQ ID NO: 34362 - protein, 426 aa, Arabidopsis thaliana
  misc_feature (1)..(426): Ceres Seq. ID no. 13606011
MNLRDASVTRPSASGRPPLLGVDVLGLKKRGQGLRSWIRVDTSGNTQVMEVDKFTMMRRCDLPARDLRLLDPLFVYPSTILGREKAIVVNLEQIRCIITADEVLLLNSLDNYVLRYVVELQQRLKTSSVGEMWQQENSQLSRRRSRSFDNAFENSSPDYLPFEFRALEIALEAACTFLDSQASELEIEAYPLLDELTSKISTLNLERVRRLKSRLVALTRRVQKVRDEIEQLMDDDGDMAEMYLTEKKRRMEGSMYGDQSLLGYRSNDGLSVSAPVSPVSSPPDSRRLDKSLSIARSRHDSARSSEGAENIEELEMLLEAYFVVIDSTLNKLTSLKEYIDDTEDFINIQLDNVRNQLIQFELLLTTATFVVAIFGVVAGIFGMNFEIDFFNQPGAFRWVLIITGVCGFVIFSAFVWFFKYRRLMPL

SEQ ID NO: 34363 - protein, 378 aa, Arabidopsis thaliana
  misc_feature (1)..(378): Ceres Seq. ID no. 13606012
MEVDKFTMMRRCDLPARDLRLLDPLFVYPSTILGREKAIVVNLEQIRCIITADEVLLLNSLDNYVLRYVVELQQRLKTSSVGEMWQQENSQLSRRRSRSFDNAFENSSPDYLPFEFRALEIALEAACTFLDSQASELEIEAYPLLDELTSKISTLNLERVRRLKSRLVALTRRVQKVRDEIEQLMDDDGDMAEMYLTEKKRRMEGSMYGDQSLLGYRSNDGLSVSAPVSPVSSPPDSRRLDKSLSIARSRHDSARSSEGAENIEELEMLLEAYFVVIDSTLNKLTSLKEYIDDTEDFINIQLDNVRNQLIQFELLLTTATFVVAIFGVVAGIFGMNFEIDFFNQPGAFRWVLIITGVCGFVIFSAFVWFFKYRRLMPL

SEQ ID NO: 34364 - DNA, 2331 bp, Arabidopsis thaliana
  misc_feature (1)..(2331): Ceres Seq. ID no. 13606013
ggtacgtttgcgcgatttctccacctttccacaatcccctgggttgtgccacgaccttttttctcgaaatgtctcgttcctctcgtcggattcgtatatatagcttcttccatcgtttccgattcttcatcaaacagataaacaaacaaaagaaatcgaaaaacctcacttccaatttcattcaattactgaagcttttttttagcaacaatggcgacgaaatcagagaaagctattggtatcgatctcggcactacatacagttgtgtcggagtttggatgaatgatcgtgtggagatcattccgaacgatcagggaaaccgtacgacgccgtcgtacgtcgccttcactgatactgagcggctgatcggagacgcggcaaagaatcaagtggctttgaatcctcagaacactgtattcgatgcgaaacgtctcatcggaaggaagttctctgatccttctgttcagagtgacatactccactggccgttcaaggttgtttccggccccggtgagaagccgatgatagtcgtttcgtataagaatgaagagaagcagttttctcctgaggaaatatcttccatggtgttggtgaagatgaaggaagtcgctgaggctttcttaggtcgcacagttaaaaacgccgttgtaacggttccggcgtattttaacgattcgcagagacaggctacgaaggacgccggagctatctctgggcttaatgttttgaggataatcaatgagccgactgctgcagctatagcttatggtttggataagaagggtacgaaggccggtgagaagaacgttttgattttcgatctcggtggtggaacttttgatgtttcgctgttgacgattgaagaaggtgtctttgaagtgaaagctactgctggagatactcatcttggtggtgaagactttgacaacagacttgtgaaccatttcgttgcggagtttaggaggaaacacaagaaggatattgctgggaatgcgagagctcttaggaggctaaggacagcttgtgagagagcaaagagaacactttcgtccacggctcagacgactattgagattgattctctgcacgagggtattgacttctatgcgacgatatcacgtgcaaggtttgaggagatgaacatggatttgttcaggaaatgtatggatcctgtggagaaagttcttaaagacgccaagctcgacaagagcagtgtgcacgatgttgttctggttggagggtcgacgaggattccgaaaattcaacagcttttgcaagatttctttaatgggaaggagttatgcaagagcataaaccctgatgaagctgttgcctatggagctgcggttcaggctgcgattcttacaggtgaaggaagtgaaaaggtccaggatcttctgcttcttgatgttgctccgcttagccttggacttgagacagcaggtggggtcatgactgtgttaattccaagaaacacgacggttccttgtaagaaggagcaagtgttctctacgtatgcagacaatcaaccaggcgttctgatccaagtctacgaaggagaacgtgcaaggaccagagataacaaccttctcggaactttcgagctcaagggcattcctcctgctccacgtggggttcctcaaatcaatgtttgcttcgacattgacgcgaatgggatcttaaatgtgtcggctgaggataaaaccgctggtgtgaagaaccagatcacgatcaccaacgacaaaggaaggttgagtaaagaggagatagagaagatggtgcaagatgctgagaagtacaaggctgaggatgagcaagtgaagaagaaggtggaggccaagaattcgcttgagaactatgcttacaacatgagaaacactatcaaggatgagaaactcgcacagaaactaactcaagaggataagcagaagattgagaaggcgattgatgaaacaattgaatggatcgaaggaaaccagctggcggaagttgatgagtttgagtacaagttgaaagagttagaaggtatttgcaacccaatcatctcaaagatgtatcagggtggtgctgctgctggaggtatgccgacagatggtgatttcagtagctcaggtgctgctggaggtcccaagatcgaagaggtggattagagcgtgtttagtgtgttaagacgaaagagtggctttggaccattagcgagtcttttctttgtattgtgtcaaatagtgttgtgtactcataggtgttttgctagtgaacgatagttgtatgctttacatatttcagctgtttcagttgtttcgagtaataaagtgatatacttttttctc

SEQ ID NO: 34365 - protein, 646 aa, Arabidopsis thaliana
  misc_feature (1)..(646): Ceres Seq. ID no. 13606014
MATKSEKAIGIDLGTTYSCVGVWMNDRVEIIPNDQGNRTTPSYVAFTDTERLIGDAAKNQVALNPQNTVFDAKRLIGRKFSDPSVQSDILHWPFKVVSGPGEKPMIVVSYKNEEKQFSPEEISSMVLVKMKEVAEAFLGRTVKNAVVTVPAYFNDSQRQATKDAGAISGLNVLRIINEPTAAAIAYGLDKKGTKAGEKNVLIFDLGGGTFDVSLLTIEEGVFEVKATAGDTHLGGEDFDNRLVNHFVAEFRRKHKKDIAGNARALRRLRTACERAKRTLSSTAQTTIEIDSLHEGIDFYATISRARFEEMNMDLFRKCMDPVEKVLKDAKLDKSSVHDVVLVGGSTRIPKIQQLLQDFFNGKELCKSINPDEAVAYGAAVQAAILTGEGSEKVQDLLLLDVAPLSLGLETAGGVMTVLIPRNTTVPCKKEQVFSTYADNQPGVLIQVYEGERARTRDNNLLGTFELKGIPPAPRGVPQINVCFDIDANGILNVSAEDKTAGVKNQITITNDKGRLSKEEIEKMVQDAEKYKAEDEQVKKKVEAKNSLENYAYNMRNTIKDEKLAQKLTQEDKQKIEKAIDETIEWIEGNQLAEVDEFEYKLKELEGICNPIISKMYQGGAAAGGMPTDGDFSSSGAAGGPKIEEVD

SEQ ID NO: 34366 - protein, 623 aa, Arabidopsis thaliana
  misc_feature (1)..(623): Ceres Seq. ID no. 13606015
MNDRVEIIPNDQGNRTTPSYVAFTDTERLIGDAAKNQVALNPQNTVFDAKRLIGRKFSDPSVQSDILHWPFKVVSGPGEKPMIVVSYKNEEKQFSPEEISSMVLVKMKEVAEAFLGRTVKNAVVTVPAYFNDSQRQATKDAGAISGLNVLRIINEPTAAAIAYGLDKKGTKAGEKNVLIFDLGGGTFDVSLLTIEEGVFEVKATAGDTHLGGEDFDNRLVNHFVAEFRRKHKKDIAGNARALRRLRTACERAKRTLSSTAQTTIEIDSLHEGIDFYATISRARFEEMNMDLFRKCMDPVEKVLKDAKLDKSSVHDVVLVGGSTRIPKIQQLLQDFFNGKELCKSINPDEAVAYGAAVQAAILTGEGSEKVQDLLLLDVAPLSLGLETAGGVMTVLIPRNTTVPCKKEQVFSTYADNQPGVLIQVYEGERARTRDNNLLGTFELKGIPPAPRGVPQINVCFDIDANGILNVSAEDKTAGVKNQITITNDKGRLSKEEIEKMVQDAEKYKAEDEQVKKKVEAKNSLENYAYNMRNTIKDEKLAQKLTQEDKQKIEKAIDETIEWIEGNQLAEVDEFEYKLKELEGICNPIISKMYQGGAAAGGMPTDGDFSSSGAAGGPKIEEVD

SEQ ID NO: 34367 - protein, 542 aa, Arabidopsis thaliana
  misc_feature (1)..(542): Ceres Seq. ID no. 13606016
MIVVSYKNEEKQFSPEEISSMVLVKMKEVAEAFLGRTVKNAVVTVPAYFNDSQRQATKDAGAISGLNVLRIINEPTAAAIAYGLDKKGTKAGEKNVLIFDLGGGTFDVSLLTIEEGVFEVKATAGDTHLGGEDFDNRLVNHFVAEFRRKHKKDIAGNARALRRLRTACERAKRTLSSTAQTTIEIDSLHEGIDFYATISRARFEEMNMDLFRKCMDPVEKVLKDAKLDKSSVHDVVLVGGSTRIPKIQQLLQDFFNGKELCKSINPDEAVAYGAAVQAAILTGEGSEKVQDLLLLDVAPLSLGLETAGGVMTVLIPRNTTVPCKKEQVFSTYADNQPGVLIQVYEGERARTRDNNLLGTFELKGIPPAPRGVPQINVCFDIDANGILNVSAEDKTAGVKNQITITNDKGRLSKEEIEKMVQDAEKYKAEDEQVKKKVEAKNSLENYAYNMRNTIKDEKLAQKLTQEDKQKIEKAIDETIEWIEGNQLAEVDEFEYKLKELEGICNPIISKMYQGGAAAGGMPTDGDFSSSGAAGGPKIEEVD

SEQ ID NO: 34368 - DNA, 2552 bp, Arabidopsis thaliana
  misc_feature (1)..(2552): Ceres Seq. ID no. 13606021
acgcatcatccatcttatctcatttctgacattttcgtctatgcagagtcttgatttttgttttctcccttcattaaacaacattactagaatcaaaagatcagatagagctggcaagttgagagaacaagaacaagatcagtatgaagacagagactcacaaccgtcaatgcattccactagcgatctctgtcctatctctgttcatcaatggcgtctcatcagcaagacaacctccagatcggtgtaacagagtctgcggagaaatatcaattcctttcccgtttggcatcggtgggaaagattgctatctaaacccgtggtacgaggttgtctgtaacagcacaaactctgttccgttcctctcaaggatcaacagagaattggtgaacatctctctcaatggagttgtccacatcaaagctcccgtaacttcctccggctgttctacaggaacatctcagccacttacaccgccgcctttaaacgttgctggccaaggcagcccctatttcctcacggacaagaacctactcgtggcggttggttgcaaattcaaggctgttatggcgggtattacatcgcagatcaccagttgtgagtcgagttgtaacgagagaaacagtagcagccaagaaggaagaaacaaaatctgcaatggttataaatgttgccagacgaggataccagaagggcagccgcaagtaatcagtgtggatatagagatccctcaaggtaacaacacaacaggagaaggaggatgcagagttgcgtttttgacgagcgacaagtattcaagtttaaatgttacagagccagaaaagtttcatggtcatggatacgcggcggtcgagcttggatggttctttgatacttccgattctcgtgatacacaacccataagttgtaaaaatgcgtcagatacaacaccgtacacttccgatacgaggtgtagttgctcatacggctacttttctggattcagctatagggactgctactgtaactccccaggttataaagggaatccgttccttccaggtggttgtgtagacgtggatgaatgtaaactagatataggacgcaaccagtgtaaagatcaaagctgtgtgaatctgcccggttggtttgactgccagcccaagaaaccagagcagctcaagcgggtgattcaaggtgttcttataggttcagcactgttgcttttcgccttcggaatcttcgggttgtacaagttcgtacagaagcggaggaaactaatccgaatgaggaagttcttcagacgtaatggaggtatgttgttaaaacaacagttagctagaaaagaaggcaatgtagagatgtcaagaatattcagctcacatgagttggagaaagctactgataacttcaacaagaatagggttcttgggcaaggaggtcaaggtacagtgtataagggaatgctcgttgatggtagaatcgtcgcagtaaaaaggtcgaaagctgtggatgaagatagggtagaagagttcatcaatgaagttgttgttcttgcgcagatcaatcatagaaatattgttaaacttttggggtgttgtcttgaaacggaagttccagtcttagtttatgagtttgttccaaatggagacttatgcaagcgtcttcatgatgaatctgatgattacacaatgacatgggaggtgcgtcttcacattgctatagagattgcaggagcactttcttatttgcattctgctgcatctttccccatatatcatagagatatcaagactactaatatactcttagatgagagaaaccgagctaaggtgtcggatttcggaacttcaagatcagtaactatagatcaaactcacttgacaactcaagttgcaggcacttttggatatgtggatccagagtactttcaatcaagcaagtttacggaaaaaagtgatgtttatagttttggagttgtccttgtggagctcttaaccggagaaaaaccttcctcccgtgtccggtctgaagaaaacaggggccttgcagctcactttgtcgaagccgtgaaagagaacagagtgcttgacatagttgatgatcggatcaaagatgaatgcaacatggaccaagtaatgtcagtggcaaatctagctagaaggtgtttaaaccgaaaagggaagaagaggccaaacatgagagaggtttcaattgagctggagatgattcgttcatcacattatgattcaggaattcatatagaggacgacgatgaggaagatgatcaagccatggaactcaactttaacgacacttgggaggttggtgcgactgctccagcctccatgtttaacaatgcatcccccacgtctgatgctgagcctctggtgcctttacgaacatggtaatgatcaactcaaaacactgcatatgtatactctcatctgatgtaaactttcgataatgaatatttggttttcaccatgtaatataacacacaaattgcattatattttcaagaagaaaaataatgttttagtacaagaacaataaatggggcttcaaccttc

SEQ ID NO: 34369 - protein, 748 aa, Arabidopsis thaliana
  misc_feature (1)..(748): Ceres Seq. ID no. 13606022
MKTETHNRQCIPLAISVLSLFINGVSSARQPPDRCNRVCGEISIPFPFGIGGKDCYLNPWYEVVCNSTNSVPFLSRINRELVNISLNGVVHIKAPVTSSGCSTGTSQPLTPPPLNVAGQGSPYFLTDKNLLVAVGCKFKAVMAGITSQITSCESSCNERNSSSQEGRNKICNGYKCCQTRIPEGQPQVISVDIEIPQGNNTTGEGGCRVAFLTSDKYSSLNVTEPEKFHGHGYAAVELGWFFDTSDSRDTQPISCKNASDTTPYTSDTRCSCSYGYFSGFSYRDCYCNSPGYKGNPFLPGGCVDVDECKLDIGRNQCKDQSCVNLPGWFDCQPKKPEQLKRVIQGVLIGSALLLFAFGIFGLYKFVQKRRKLIRMRKFFRRNGGMLLKQQLARKEGNVEMSRIFSSHELEKATDNFNKNRVLGQGGQGTVYKGMLVDGRIVAVKRSKAVDEDRVEEFINEVVVLAQINHRNIVKLLGCCLETEVPVLVYEFVPNGDLCKRLHDESDDYTMTWEVRLHIAIEIAGALSYLHSAASFPIYHRDIKTTNILLDERNRAKVSDFGTSRSVTIDQTHLTTQVAGTFGYVDPEYFQSSKFTEKSDVYSFGVVLVELLTGEKPSSRVRSEENRGLAAHFVEAVKENRVLDIVDDRIKDECNMDQVMSVANLARRCLNRKGKKRPNMREVSIELEMIRSSHYDSGIHIEDDDEEDDQAMELNFNDTWEVGATAPASMFNNASPTSDAEPLVPLRTW

SEQ ID NO: 34370 - protein, 607 aa, Arabidopsis thaliana
  misc_feature (1)..(607): Ceres Seq. ID no. 13606023
MAGITSQITSCESSCNERNSSSQEGRNKICNGYKCCQTRIPEGQPQVISVDIEIPQGNNTTGEGGCRVAFLTSDKYSSLNVTEPEKFHGHGYAAVELGWFFDTSDSRDTQPISCKNASDTTPYTSDTRCSCSYGYFSGFSYRDCYCNSPGYKGNPFLPGGCVDVDECKLDIGRNQCKDQSCVNLPGWFDCQPKKPEQLKRVIQGVLIGSALLLFAFGIFGLYKFVQKRRKLIRMRKFFRRNGGMLLKQQLARKEGNVEMSRIFSSHELEKATDNFNKNRVLGQGGQGTVYKGMLVDGRIVAVKRSKAVDEDRVEEFINEVVVLAQINHRNIVKLLGCCLETEVPVLVYEFVPNGDLCKRLHDESDDYTMTWEVRLHIAIEIAGALSYLHSAASFPIYHRDIKTTNILLDERNRAKVSDFGTSRSVTIDQTHLTTQVAGTFGYVDPEYFQSSKFTEKSDVYSFGVVLVELLTGEKPSSRVRSEENRGLAAHFVEAVKENRVLDIVDDRIKDECNMDQVMSVANLARRCLNRKGKKRPNMREVSIELEMIRSSHYDSGIHIEDDDEEDDQAMELNFNDTWEVGATAPASMFNNASPTSDAEPLVPLRTW

SEQ ID NO: 34371 - protein, 374 aa, Arabidopsis thaliana
  misc_feature (1)..(374): Ceres Seq. ID no. 13606024
MRKFFRRNGGMLLKQQLARKEGNVEMSRIFSSHELEKATDNFNKNRVLGQGGQGTVYKGMLVDGRIVAVKRSKAVDEDRVEEFINEVVVLAQINHRNIVKLLGCCLETEVPVLVYEFVPNGDLCKRLHDESDDYTMTWEVRLHIAIEIAGALSYLHSAASFPIYHRDIKTTNILLDERNRAKVSDFGTSRSVTIDQTHLTTQVAGTFGYVDPEYFQSSKFTEKSDVYSFGVVLVELLTGEKPSSRVRSEENRGLAAHFVEAVKENRVLDIVDDRIKDECNMDQVMSVANLARRCLNRKGKKRPNMREVSIELEMIRSSHYDSGIHIEDDDEEDDQAMELNFNDTWEVGATAPASMFNNASPTSDAEPLVPLRTW

SEQ ID NO: 34372 - DNA, 778 bp, Arabidopsis thaliana
  misc_feature (1)..(778): Ceres Seq. ID no. 13606025
gtagtgtaacatagtatttgatttgtatactaaaataaatgtaaaatttatcgggctgttgtacctggcaagtacaccatatgtgtactctctcctcaatgctctcgtcataatctttccatgtcttcttctctctatatatattacttaactctttctcactctctctaattttaaatttatctatcattagtttaaaccgccggagaacaaaaaatgaagcatctcatccgccgcctctctagagtcgccgactcatcctccgaattctccatccgccgttccacctcctccttccgcaaccgtcgcggtcaccatcgtctccacgcgccgccgcctccgtggtcaatatgtccagctagaagagtcaacaccgtccccgctggtcacgtacctgtctacgtcggcgaggagatggagaggttcgtggttagcgcagagcttatgaaccacccgatcttcgttggtttgctaaaccgatccgctcaagaatacggttacgctcagaaaggagttcttcatatcccttgccacgtcatcgtgtttgagcgcgtggtggaaacgctccggttgggagggtttgaagggtccggtgatctagagaatcttgtggcttcgttgctctccggtgatgagttgatacctgaaactacagagtagcttttgaagaagaatccaaatcggcgatttgatattttctctgttttctctgttttctttcaattttccgtttttttactttctcgattttgtaaacatataattatatatacaccag

SEQ ID NO: 34373 - protein, 147 aa, Arabidopsis thaliana
  misc_feature (1)..(147): Ceres Seq. ID no. 13606026
MKHLIRRLSRVADSSSEFSIRRSTSSFRNRRGHHRLHAPPPPWSICPARRVNTVPAGHVPVYVGEEMERFVVSAELMNHPIFVGLLNRSAQEYGYAQKGVLHIPCHVIVFERVVETLRLGGFEGSGDLENLVASLLSGDELIPETTE

SEQ ID NO: 34374 - protein, 81 aa, Arabidopsis thaliana
  misc_feature (1)..(81): Ceres Seq. ID no. 13606027
MERFVVSAELMNHPIFVGLLNRSAQEYGYAQKGVLHIPCHVIVFERVVETLRLGGFEGSGDLENLVASLLSGDELIPETTE

SEQ ID NO: 34375 - DNA, 1349 bp, Arabidopsis thaliana
  misc_feature (1)..(1349): Ceres Seq. ID no. 13606028
attcattatatgcacaaataataggttagatttggcttttagctttgcctacatctctttttttcttgtttcatccaaggagaagaaagcccccatggaagccaaagaagaaaccccgtggagctctattttagttccttctgttcaggagatggtgaaggataagatgatcacgaccgttcctcccagatatgttcggtatgatcaagacaaaactgaagtcgtcgtccatgattctggcctcatatccgagatccccatcatcgacatgaatcggttgtgttcttctaccgccgtggactctgaggttgagaaactcgactttgcttgcaaagaatatggatttttccagcttgtaaaccatggaatagacccaagtttcttggacaaaataaagtcagagattcaagatttcttcaaccttcccatggaagaaaaaaagaagttgtggcagacaccagcggtgatggaagggtttggacaagcttttgtggtttcagaagatcagaaactcgactgggcagatttattcttccttataatgcaacctgttcaattacgcaagcgtcacttgttccccaagctacctcttccctttagggatacgttagatatgtattccactcgagtaaagagtatagctaagatcttactagcgaaaatggcgaaagccttgcagatcaagccagaggaggtagaagaaatatttggtgatgatatgatgcagagtatgaggatgaactactatcccccgtgtccacaacctaatctggttacgggtctaattccgcattccgatgcagtcgggctcaccatacttttgcaggtgaatgaagttgacggtctccaaatcaagaaaaatggcaagtggttttttgtcaaacctctccaaaatgctttcattgtcaatgttggggacgtgttagagatcataacgaacgggacataccgaagcatcgagcaccgggcaatggtgaacttggagaaagagaggctctccattgcgacatttcacaacacgggaatggataaagaaattggtccggcgagaagccttgttcaaagacaagaggctgcaaagtttagaagcctgaaaactaaagactacttgaatggcttgttttcccgtgaactcaaaggaaaggcttatcttgatgctatgagaattgaagggaagtgatatcttgtttcccaagaaattctgttttctccaactggtcactgtcgtgttcatattctgtttttccttctctcttatgtctttggttcaaatctgttaaagaaaaaaacgcctgtgaataatacttaataagctcgttcgtcttcgtcaacatacaaaaatatcaact

SEQ ID NO: 34376 - protein, 392 aa, Arabidopsis thaliana
  misc_feature (1)..(392): Ceres Seq. ID no. 13606029
FIICTNNRLDLAFSFAYISFFLVSSKEKKAPMEAKEETPWSSILVPSVQEMVKDKMITTVPPRYVRYDQDKTEVVVHDSGLISEIPIIDMNRLCSSTAVDSEVEKLDFACKEYGFFQLVNHGIDPSFLDKIKSEIQDFFNLPMEEKKKLWQTPAVMEGFGQAFVVSEDQKLDWADLFFLIMQPVQLRKRHLFPKLPLPFRDTLDMYSTRVKSIAKILLAKMAKALQIKPEEVEEIFGDDMMQSMRMNYYPPCPQPNLVTGLIPHSDAVGLTILLQVNEVDGLQIKKNGKWFFVKPLQNAFIVNVGDVLEIITNGTYRSIEHRAMVNLEKERLSIATFHNTGMDKEIGPARSLVQRQEAAKFRSLKTKDYLNGLFSRELKGKAYLDAMRIEGK

SEQ ID NO: 34377 - protein, 361 aa, Arabidopsis thaliana
  misc_feature (1)..(361): Ceres Seq. ID no. 13606030
MEAKEETPWSSILVPSVQEMVKDKMITTVPPRYVRYDQDKTEVVVHDSGLISEIPIIDMNRLCSSTAVDSEVEKLDFACKEYGFFQLVNHGIDPSFLDKIKSEIQDFFNLPMEEKKKLWQTPAVMEGFGQAFVVSEDQKLDWADLFFLIMQPVQLRKRHLFPKLPLPFRDTLDMYSTRVKSIAKILLAKMAKALQIKPEEVEEIFGDDMMQSMRMNYYPPCPQPNLVTGLIPHSDAVGLTILLQVNEVDGLQIKKNGKWFFVKPLQNAFIVNVGDVLEIITNGTYRSIEHRAMVNLEKERLSIATFHNTGMDKEIGPARSLVQRQEAAKFRSLKTKDYLNGLFSRELKGKAYLDAMRIEGK

SEQ ID NO: 34378 - protein, 342 aa, Arabidopsis thaliana
  misc_feature (1)..(342): Ceres Seq. ID no. 13606031
MVKDKMITTVPPRYVRYDQDKTEVVVHDSGLISEIPIIDMNRLCSSTAVDSEVEKLDFACKEYGFFQLVNHGIDPSFLDKIKSEIQDFFNLPMEEKKKLWQTPAVMEGFGQAFVVSEDQKLDWADLFFLIMQPVQLRKRHLFPKLPLPFRDTLDMYSTRVKSIAKILLAKMAKALQIKPEEVEEIFGDDMMQSMRMNYYPPCPQPNLVTGLIPHSDAVGLTILLQVNEVDGLQIKKNGKWFFVKPLQNAFIVNVGDVLEIITNGTYRSIEHRAMVNLEKERLSIATFHNTGMDKEIGPARSLVQRQEAAKFRSLKTKDYLNGLFSRELKGKAYLDAMRIEGK

SEQ ID NO: 34379 - DNA, 1396 bp, Arabidopsis thaliana
  misc_feature (1)..(1396): Ceres Seq. ID no. 13606032
aattcggcacgagccaaacttttgtttcgtccaggaaagaagccgacatggaagcaaaaggggcagcacagtggagctctatcctagttccatccgttcaagagatggttaaggagaagacgatcacgaccgttcctcctaggtacgtccggtctgatcaagacaaaactgaagtcgatgatgattttgatgtgaaaattgagatcccaatcatcgatatgaagcgtttgtgttcttcaaccaccatggattctgaggttgagaaactcgacttcgcttgcaaagagtggggatttttccagcttgtaaaccatggaatagactcaagtttcttggacaaagtaaagtcagagattcaagatttcttcaaccttcccatggaagaaaagaagaagttctggcagcgaccagatgagatagaaggtttcggacaagcttttgtggtttcagaagatcagaaactagattgggcagacttgttcttccataccgtgcaaccagttgaattacgcaagcctcacttgttccccaagctacctcttccctttagagatacactggagatgtattcttctgaagtgcagagcgtagctaagatcttaatagcgaaaatggcaagagccctagagatcaaaccagaggaactggaaaagttgtttgatgatgttgattcggttcaaagtatgaggatgaattactacccaccatgcccacaaccagatcaggttattggtctaaccccgcattctgattcggtcggactcactgtactgatgcaagtgaatgacgttgaaggtctccaaatcaagaaagatgggaaatgggttcctgttaaacccctcccaaatgctttcattgtcaatattggagacgtcttagagatcataactaatgggacataccgaagcatagagcatcgcggagttgtgaattcagagaaagagaggctctctattgcaacgtttcacaatgtgggaatgtataaagaagttggtcctgcaaaaagcctagttgaaagacaaaaggttgcaagattcaaaaggctgaccatgaaagagtataacgatggtttgttctctcgtactctcgacggaaaagcttatctagatgctttgagaatctaaagagagcaatgccttgtcgcccactactctgtttctctgttttcttgatttatgcaataaaacaatctctataatcttatcttcattgtctctctatttgcttcatttcgttaaagacaaaaatctcctgtagagaatgcttctacgtattgctacaataagacaataagtttgttcttagcaaaaaaaaggacaataagtttgttaaagtttcttgacacgttcgttgttgctcaaagatatacctaataatatgatcacatgattcacat

SEQ ID NO: 34380 - protein, 373 aa, Arabidopsis thaliana
  misc_feature (1)..(373): Ceres Seq. ID no. 13606033
FGTSQTFVSSRKEADMEAKGAAQWSSILVPSVQEMVKEKTITTVPPRYVRSDQDKTEVDDDFDVKIEIPIIDMKRLCSSTTMDSEVEKLDFACKEWGFFQLVNHGIDSSFLDKVKSEIQDFFNLPMEEKKKFWQRPDEIEGFGQAFVVSEDQKLDWADLFFHTVQPVELRKPHLFPKLPLPFRDTLEMYSSEVQSVAKILIAKMARALEIKPEELEKLFDDVDSVQSMRMNYYPPCPQPDQVIGLTPHSDSVGLTVLMQVNDVEGLQIKKDGKWVPVKPLPNAFIVNIGDVLEIITNGTYRSIEHRGVVNSEKERLSIATFHNVGMYKEVGPAKSLVERQKVARFKRLTMKEYNDGLFSRTLDGKAYLDALRI

SEQ ID NO: 34381 - protein, 358 aa, Arabidopsis thaliana
  misc_feature (1)..(358): Ceres Seq. ID no. 13606034
MEAKGAAQWSSILVPSVQEMVKEKTITTVPPRYVRSDQDKTEVDDDFDVKIEIPIIDMKRLCSSTTMDSEVEKLDFACKEWGFFQLVNHGIDSSFLDKVKSEIQDFFNLPMEEKKKFWQRPDEIEGFGQAFVVSEDQKLDWADLFFHTVQPVELRKPHLFPKLPLPFRDTLEMYSSEVQSVAKILIAKMARALEIKPEELEKLFDDVDSVQSMRMNYYPPCPQPDQVIGLTPHSDSVGLTVLMQVNDVEGLQIKKDGKWVPVKPLPNAFIVNIGDVLEIITNGTYRSIEHRGVVNSEKERLSIATFHNVGMYKEVGPAKSLVERQKVARFKRLTMKEYNDGLFSRTLDGKAYLDALRI

SEQ ID NO: 34382 - protein, 339 aa, Arabidopsis thaliana
  misc_feature (1)..(339): Ceres Seq. ID no. 13606035
MVKEKTITTVPPRYVRSDQDKTEVDDDFDVKIEIPIIDMKRLCSSTTMDSEVEKLDFACKEWGFFQLVNHGIDSSFLDKVKSEIQDFFNLPMEEKKKFWQRPDEIEGFGQAFVVSEDQKLDWADLFFHTVQPVELRKPHLFPKLPLPFRDTLEMYSSEVQSVAKILIAKMARALEIKPEELEKLFDDVDSVQSMRMNYYPPCPQPDQVIGLTPHSDSVGLTVLMQVNDVEGLQIKKDGKWVPVKPLPNAFIVNIGDVLEIITNGTYRSIEHRGVVNSEKERLSIATFHNVGMYKEVGPAKSLVERQKVARFKRLTMKEYNDGLFSRTLDGKAYLDALRI

SEQ ID NO: 34383 - DNA, 1372 bp, Arabidopsis thaliana
  misc_feature (1)..(1372): Ceres Seq. ID no. 13606036
atgatgatgtcatgtcggaatatagacttgggtacgagtgttcttgatcattcttgtagctcttcttcaacaagtcgtcgattcttgtttggcaattcttcgaagaccgtttgtatgattggtggcagaagctgtgttggaaatttggtatttctccggcgagatttggctacttgcagagctgttccggctaaatccaaggagaattctctggtcaacggtattggtcaagatcaaacagtgatgctcaatctgaggcaagagtcacgaaagccaatatctttggaaactctgtttgaggtcgtagctgatgatttgcagaggttgaacgacaatcttttatcgattgttggtgcagaaaatccggttttgatatctgctgctgagcaaatcttcagcgctggtggcaagaggatgagaccgggtttggtattccttgtatcacgagccactgcggaattagcaggcttaaaggaacttacagtagaacatcggcgtttaggtgagatcattgagatgattcacaccgcaagtttgatacacgatgatgtgttagacgaaagtgatatgcgaagaggaagggaaacggttcacgagctattcggaacaagagtagctgtattagctggggatttcatgtttgctcaagcatcatggtacttagcaaatctcgaaaaccttgaagtcattaagctcataagtcaggtgatcaaagattttgcaagcggtgagataaagcaagcatcgagtttattcgattgtgatgtcaagcttgatgactacatgctaaagagttactacaagacagcttcattagtagctgcaagcaccaaaggagcagcaattttcagtaaagtcgaaagcaaggtcgcagagcaaatgtatcagttcgggaagaatctcggtttatcttttcaagtagttgatgacattctggacttcactcagtccacagagcagttaggtaagcctgcagctaatgacctagccaaaggtaacataacggcgccagtgatcttcgcgctagagaatgagccaaggctaagagagatcattgagtctgagttttgtgagcctggatcgcttgaagaagcgattgaaatagttagaaatcgcggtgggatcaagaaagctcaagaattagcaaaggagaaagctgaacttgcgttaaagaatttgaattgtcttcctaggagtggtttcagatcggctcttgaggatatggtaatgtttaatcttgaaaggattgattagtttcaaagggtatttggcagaggaaactgtaacaacactctttacttgttcaaaacttcaaacacagatttttttttttactgtatgtcataatggagtaataaacaaaaattcatgc

SEQ ID NO: 34384 - protein, 417 aa, Arabidopsis thaliana
  misc_feature (1)..(417): Ceres Seq. ID no. 13606037
MMMSCRNIDLGTSVLDHSCSSSSTSRRFLFGNSSKTVCMIGGRSCVGNLVFLRRDLATCRAVPAKSKENSLVNGIGQDQTVMLNLRQESRKPISLETLFEVVADDLQRLNDNLLSIVGAENPVLISAAEQIFSAGGKRMRPGLVFLVSRATAELAGLKELTVEHRRLGEIIEMIHTASLIHDDVLDESDMRRGRETVHELFGTRVAVLAGDFMFAQASWYLANLENLEVIKLISQVIKDFASGEIKQASSLFDCDVKLDDYMLKSYYKTASLVAASTKGAAIFSKVESKVAEQMYQFGKNLGLSFQVVDDILDFTQSTEQLGKPAANDLAKGNITAPVIFALENEPRLREIIESEFCEPGSLEEAIEIVRNRGGIKKAQELAKEKAELALKNLNCLPRSGFRSALEDMVMFNLERID

SEQ ID NO: 34385 - protein, 416 aa, Arabidopsis thaliana
  misc_feature (1)..(416): Ceres Seq. ID no. 13606038
MMSCRNIDLGTSVLDHSCSSSSTSRRFLFGNSSKTVCMIGGRSCVGNLVFLRRDLATCRAVPAKSKENSLVNGIGQDQTVMLNLRQESRKPISLETLFEVVADDLQRLNDNLLSIVGAENPVLISAAEQIFSAGGKRMRPGLVFLVSRATAELAGLKELTVEHRRLGEIIEMIHTASLIHDDVLDESDMRRGRETVHELFGTRVAVLAGDFMFAQASWYLANLENLEVIKLISQVIKDFASGEIKQASSLFDCDVKLDDYMLKSYYKTASLVAASTKGAAIFSKVESKVAEQMYQFGKNLGLSFQVVDDILDFTQSTEQLGKPAANDLAKGNITAPVIFALENEPRLREIIESEFCEPGSLEEAIEIVRNRGGIKKAQELAKEKAELALKNLNCLPRSGFRSALEDMVMFNLERID

SEQ ID NO: 34386 - protein, 415 aa, Arabidopsis thaliana
  misc_feature (1)..(415): Ceres Seq. ID no. 13606039
MSCRNIDLGTSVLDHSCSSSSTSRRFLFGNSSKTVCMIGGRSCVGNLVFLRRDLATCRAVPAKSKENSLVNGIGQDQTVMLNLRQESRKPISLETLFEVVADDLQRLNDNLLSIVGAENPVLISAAEQIFSAGGKRMRPGLVFLVSRATAELAGLKELTVEHRRLGEIIEMIHTASLIHDDVLDESDMRRGRETVHELFGTRVAVLAGDFMFAQASWYLANLENLEVIKLISQVIKDFASGEIKQASSLFDCDVKLDDYMLKSYYKTASLVAASTKGAAIFSKVESKVAEQMYQFGKNLGLSFQVVDDILDFTQSTEQLGKPAANDLAKGNITAPVIFALENEPRLREIIESEFCEPGSLEEAIEIVRNRGGIKKAQELAKEKAELALKNLNCLPRSGFRSALEDMVMFNLERID

SEQ ID NO: 34387 - DNA, 673 bp, Arabidopsis thaliana
  misc_feature (1)..(673): Ceres Seq. ID no. 13606048
ctactagattaactattatacaatcaagcttcgtctccgcaagaacaagactcaattacgtctccaagacaaatcattctgggttcgcttgtcgttctctttcaaaacccagaaacttgagtctctctgtttattctatgggttcttctagttcttctccgaaaccagacaacgtccaagaggctgagaagaatgagtttgcttctctaagtgaaaatgaatggaagaaacggctaacaccagaacagtactacatcactagacagaagggcacagagagagctttcactggggagtattggaactcaaagacccctggagtatataattgtgtatgttgcgacacacctctatttgattcatcaacaaagtttgatagtggaacagggtggccatcttactaccaaccaattggaaacaatgtgaagacaaagctagacctctctatcatcttcatgcctagacaagaagttgtctgtgctgtttgtaacgcccatcttggtcatgtctttgacgacggtccacgcccaaccggaaaacgatattgcctcaacagtgctgctctgaaacttaacgcattggagaaaacaagagattgagagtttctggtacaaggatttgttcatattacataatatactgtatcattatatccactgtatttcctcgtatt

SEQ ID NO: 34388 - protein, 198 aa, Arabidopsis thaliana
  misc_feature (1)..(198): Ceres Seq. ID no. 13606049
TRLTIIQSSFVSARTRLNYVSKTNHSGFACRSLSKPRNLSLSVYSMGSSSSSPKPDNVQEAEKNEFASLSENEWKKRLTPEQYYITRQKGTERAFTGEYWNSKTPGVYNCVCCDTPLFDSSTKFDSGTGWPSYYQPIGNNVKTKLDLSIIFMPRQEVVCAVCNAHLGHVFDDGPRPTGKRYCLNSAALKLNALEKTRD

SEQ ID NO: 34389 - protein, 153 aa, Arabidopsis thaliana
  misc_feature (1)..(153): Ceres Seq. ID no. 13606050
MGSSSSSPKPDNVQEAEKNEFASLSENEWKKRLTPEQYYITRQKGTERAFTGEYWNSKTPGVYNCVCCDTPLFDSSTKFDSGTGWPSYYQPIGNNVKTKLDLSIIFMPRQEVVCAVCNAHLGHVFDDGPRPTGKRYCLNSAALKLNALEKTRD

SEQ ID NO: 34390 - DNA, 1427 bp, Arabidopsis thaliana
  misc_feature (1)..(1427): Ceres Seq. ID no. 13606054
gtaataatattcttttaaaaaaatagaaacgttggtcacgaggcctcatcaatgcttttgataccttccttcaccgcaaattctaacgaaccaccaccgtcgaagctttctctttccgatctttcaatggcgattctcaaatctcacttcttcttactcttccctcttcttcttctccactttcacactgtctcctttgctcagacgctctttgtgttcggagatggtctttacgacgccggaaacaaacagtttctctctcagaaccgagttgacgcaagctttcctccttatggagtcactgtaggacaagccaccggacggtggtccgatggttctatcgttcctgattatcttgctaaattcatgggaattcctaaaatctctccgattctcctaaccacggcggatttttctcacggagctaatttcgccatcgccgacgctaccgttcttggctctcctccggagacgatgactttgtcacaacaagtgaagaaattctcggaaaacaagaataagtggacaaatcaaacacgttctgaagctatctacttgatctacattggttctgatgattacttgagctatgctaagagtaatccaagtccatcagatactcagaaacaagcttttgttgatcaagtcatcactaccataaaagcagaaataaaggtggtttacgggtctggcggaaggaaattcgcattccagaacttggcaccgttaggttgcttaccggccgtgaaacaagcaagcggaaatgttcaagaatgtgtgaaattgccttcggaaatggctgctttgcataacaagaaacttttgcagctcttggttgaactatcaagagaactaaatggtttccagtactcgttttacgacttctttagctcgatccaaaacagagttatcaagtctaagacttatacattcgagacaggaaacgctgcttgttgtggaactggctctatcaacgggagtaattgctcagctaaaaatgtatgcgccaagcctgaagagtatatcttctttgatggtaagcatttgacgcaagaagccaaccttcaggtcgggcatttgatgtggggagcagatccggaagtgattggaccgaacaatatcagggagcttatggtccttcctctagacattacagtcatcttagctggtatacaagaagctatggctgccatgagaccgagacagagcaacattgagagtctctatgatatcaagaagatggagtcagagatggataatcattggctttatcaagttgacaaagctatctcctttatgatataagattgtggttacagtttgatttaagcgagagagtttaagagctagtgtaacaaagaactagcaagaaaactgaaacatccatttttcttgtttagtaataaaacaatcaaccttattaagtc

SEQ ID NO: 34391 - protein, 417 aa, Arabidopsis thaliana
  misc_feature (1)..(417): Ceres Seq. ID no. 13606055
MLLIPSFTANSNEPPPSKLSLSDLSMAILKSHFFLLFPLLLLHFHTVSFAQTLFVFGDGLYDAGNKQFLSQNRVDASFPPYGVTVGQATGRWSDGSIVPDYLAKFMGIPKISPILLTTADFSHGANFAIADATVLGSPPETMTLSQQVKKFSENKNKWTNQTRSEAIYLIYIGSDDYLSYAKSNPSPSDTQKQAFVDQVITTIKAEIKVVYGSGGRKFAFQNLAPLGCLPAVKQASGNVQECVKLPSEMAALHNKKLLQLLVELSRELNGFQYSFYDFFSSIQNRVIKSKTYTFETGNAACCGTGSINGSNCSAKNVCAKPEEYIFFDGKHLTQEANLQVGHLMWGADPEVIGPNNIRELMVLPLDITVILAGIQEAMAAMRPRQSNIESLYDIKKMESEMDNHWLYQVDKAISFMI

SEQ ID NO: 34392 - protein, 392 aa, Arabidopsis thaliana
  misc_feature (1)..(392): Ceres Seq. ID no. 13606056
MAILKSHFFLLFPLLLLHFHTVSFAQTLFVFGDGLYDAGNKQFLSQNRVDASFPPYGVTVGQATGRWSDGSIVPDYLAKFMGIPKISPILLTTADFSHGANFAIADATVLGSPPETMTLSQQVKKFSENKNKWTNQTRSEAIYLIYIGSDDYLSYAKSNPSPSDTQKQAFVDQVITTIKAEIKVVYGSGGRKFAFQNLAPLGCLPAVKQASGNVQECVKLPSEMAALHNKKLLQLLVELSRELNGFQYSFYDFFSSIQNRVIKSKTYTFETGNAACCGTGSINGSNCSAKNVCAKPEEYIFFDGKHLTQEANLQVGHLMWGADPEVIGPNNIRELMVLPLDITVILAGIQEAMAAMRPRQSNIESLYDIKKMESEMDNHWLYQVDKAISFMI

SEQ ID NO: 34393 - protein, 312 aa, Arabidopsis thaliana
  misc_feature (1)..(312): Ceres Seq. ID no. 13606057
MGIPKISPILLTTADFSHGANFAIADATVLGSPPETMTLSQQVKKFSENKNKWTNQTRSEAIYLIYIGSDDYLSYAKSNPSPSDTQKQAFVDQVITTIKAEIKVVYGSGGRKFAFQNLAPLGCLPAVKQASGNVQECVKLPSEMAALHNKKLLQLLVELSRELNGFQYSFYDFFSSIQNRVIKSKTYTFETGNAACCGTGSINGSNCSAKNVCAKPEEYIFFDGKHLTQEANLQVGHLMWGADPEVIGPNNIRELMVLPLDITVILAGIQEAMAAMRPRQSNIESLYDIKKMESEMDNHWLYQVDKAISFMI

SEQ ID NO: 34394 - DNA, 1635 bp, Arabidopsis thaliana
  misc_feature (1)..(1635): Ceres Seq. ID no. 13606058
gtttacatttactgttgttaaggccgagagatagatagaaaaaaacatctgtgcgattttgccgcctctccctaaaatctttggagctccttcgtagttagccggaggtgaagtacaataaaagaaagaagaaagtccaagtgtctcttctcatctcttttctccagtagataatggaggggagattggctaatatgtggaggttgactgttaacgaaagtaaattcgtggaaactgcgttgcaatctgagctcagagtagatggtcgtggcctttatgattatcgcaagcttactattaagtttggcaaagaatatggtagctcggaagttcaacttggtcagactcatgtaatgggtttcgtgactgctcagttggtacaaccttacaaagacagacctaatgaagggtctctctcgatcttcacggaattttctccaatggctgatccgtcttttgagcctggtcgtcctggcgaatctgcagtggagttgggacgcattatcgatcgtggtctaagagaaagccgtgcagtagatacagagtcactctgcgttctagctggaaagatggtttggtctgttcgcattgaccttcatatcttggacaatggagggaacttagttgatgctgcaaatattgctgctttagcagctctcatgacatttaggagacccgactgcactgtaggaggagagaatggtcaagaagtgatcatacatccactagaggaaagggaaccacttccattgataatacatcatctcccaatagccttcacgtttggattttttaataaaggcaacattgtggtgatggacccaacttatgttgaagaagcagttatgtgtgggagaatgactgtgacagttaatgccaatggcgatatatgcgcaatccaaaaaccgggggaagaaggcgtgaaccagagtgtaatccttcattgcctgcgtcttgcttcttcaagagctgctgcaacaacaaagatcattagagaagaagttgaagcatataactgtgagagaagcttacagaaggtgaagcgacatcccactttggctaaatctgaagtttctggacctactgtagctgtgaaggaggaacataggaagtcctcagatcaggaaagagctgcagagatatctcgagaacatgttgaaagactaaagctctctacggaggaagtaagaagcagtaaggaagaagaagctgccaatttcaaaggcggtccctcaaattgggacccttactcagaagctatggatgttgattcactgaaagtttctcttgcttcaagaggggatcccgttactaagtcatcgagcacgaagaaaatgaacggctctggaaatgcgcagaaggttggtgttgagatttcagttgaggaagtaaccggagaattagggaagaaggatacaaaacacaaggatggagaaatgacacttaaagatgctgtcaaacctaaaaagaagcggaaaaacaaaagctgagttaaagcattttcccgatcactcgtacttttcttcttcccttgaaactcaagactatagacggtttatggtcaattgtatctgaaaaaagtcaaaagttttgttaaattttgtttcataagatgaggcccatgattaaaaaccc

SEQ ID NO: 34395 - protein, 438 aa, Arabidopsis thaliana
  misc_feature (1)..(438): Ceres Seq. ID no. 13606059
MEGRLANMWRLTVNESKFVETALQSELRVDGRGLYDYRKLTIKFGKEYGSSEVQLGQTHVMGFVTAQLVQPYKDRPNEGSLSIFTEFSPMADPSFEPGRPGESAVELGRIIDRGLRESRAVDTESLCVLAGKMVWSVRIDLHILDNGGNLVDAANIAALAALMTFRRPDCTVGGENGQEVIIHPLEEREPLPLIIHHLPIAFTFGFFNKGNIVVMDPTYVEEAVMCGRMTVTVNANGDICAIQKPGEEGVNQSVILHCLRLASSRAAATTKIIREEVEAYNCERSLQKVKRHPTLAKSEVSGPTVAVKEEHRKSSDQERAAEISREHVERLKLSTEEVRSSKEEEAANFKGGPSNWDPYSEAMDVDSLKVSLASRGDPVTKSSSTKKMNGSGNAQKVGVEISVEEVTGELGKKDTKHKDGEMTLKDAVKPKKKRKNKS

SEQ ID NO: 34396 - protein, 431 aa, Arabidopsis thaliana
  misc_feature (1)..(431): Ceres Seq. ID no. 13606060
MWRLTVNESKFVETALQSELRVDGRGLYDYRKLTIKFGKEYGSSEVQLGQTHVMGFVTAQLVQPYKDRPNEGSLSIFTEFSPMADPSFEPGRPGESAVELGRIIDRGLRESRAVDTESLCVLAGKMVWSVRIDLHILDNGGNLVDAANIAALAALMTFRRPDCTVGGENGQEVIIHPLEEREPLPLIIHHLPIAFTFGFFNKGNIVVMDPTYVEEAVMCGRMTVTVNANGDICAIQKPGEEGVNQSVILHCLRLASSRAAATTKIIREEVEAYNCERSLQKVKRHPTLAKSEVSGPTVAVKEEHRKSSDQERAAEISREHVERLKLSTEEVRSSKEEEAANFKGGPSNWDPYSEAMDVDSLKVSLASRGDPVTKSSSTKKMNGSGNAQKVGVEISVEEVTGELGKKDTKHKDGEMTLKDAVKPKKKRKNKS

SEQ ID NO: 34397 - protein, 378 aa, Arabidopsis thaliana
  misc_feature (1)..(378): Ceres Seq. ID no. 13606061
MGFVTAQLVQPYKDRPNEGSLSIFTEFSPMADPSFEPGRPGESAVELGRIIDRGLRESRAVDTESLCVLAGKMVWSVRIDLHILDNGGNLVDAANIAALAALMTFRRPDCTVGGENGQEVIIHPLEEREPLPLIIHHLPIAFTFGFFNKGNIVVMDPTYVEEAVMCGRMTVTVNANGDICAIQKPGEEGVNQSVILHCLRLASSRAAATTKIIREEVEAYNCERSLQKVKRHPTLAKSEVSGPTVAVKEEHRKSSDQERAAEISREHVERLKLSTEEVRSSKEEEAANFKGGPSNWDPYSEAMDVDSLKVSLASRGDPVTKSSSTKKMNGSGNAQKVGVEISVEEVTGELGKKDTKHKDGEMTLKDAVKPKKKRKNKS

SEQ ID NO: 34398 - DNA, 2002 bp, Arabidopsis thaliana
  misc_feature (1)..(2002): Ceres Seq. ID no. 13606070
gtgtgcattcgtttcttccaaatgcatccaaagcaaagcaccattaaaatccttcaaagcaaaaaccttctctcaagtttttttgactgttattaactcttaggttggtcaatcagaatcaagtctttttcgtttcccaattcgatttggattttgttttcttcttcttcttcttcttcttctcgagattgcgtattttgagcgatgcgggaagtggaaacaacggcaatcacagcagctcctccacaattctctcaaatgtttcagaaattagccatggccgtcaagaccaagacctacgagttcttcaccgaagacgataatgagagaaccgatgctgagggtttctctcttctcgattcctccgaggattttatcaccgatcagaaagtcgtcgttcttaaacccgataagcctcttcttagtgcttcttctccgggatctcctattgaatctccggtgaacgatgttcagacgaagaatttgggtgtggtaagtgttgttaaacctaatcaaaagaagctttctcaggttaggaaattggatacacagatgggattgagtttgatttcttctgttttcgctactgcttcgtcttttgaagcttcgtatcttcaattgcaagctgctcacgcgccgtttgttgaggaaaatgtcaaggctgctgatagagctctcgtatctaacctccagaaattgtctgatttgaagcagttttataggaattatcgccaaagtttggattttgagtctgatttagctattgggtcttgcttagaatctcgtgttcaggagaatcagagcaagcttagagctttggaaaccgtctcaaatcgtttacaagctgagatggatgcaaaggatttgcaggtttggagtctgaggaacaaattaggtgagattcagaaatctacttccaagttgtctaagagattgtcttcaaattcatcgttggatgttctgttatcggttagggtttttgagtctctgttgtatgatgcctttaaagctactcagaaattcactaagattctgattgagttgatggaaaaagctgggtgggatttggatttagtggctaagtctgttcatcctgaggtagattatgctaaggagagacataaccggtatgcattgttgtcgtatgtttgcttggggatgtttcgtggttttgatggagaaggatttgatctaaatgagaatgattatgaagagtctgagagaagttctgtagattcttccttgagggaattgatgcaacatgtatcgagtaatccgatggagcttcttgatagagataaagattgtgcattctctagattttgcgataagaagtatcacgagctgattcatccgaacatggcatcttcgatattcagtaacatggatgaaaacgaagctgtgttgagttcttggagatctttgagcacattctatgaatcgtttgtcacgatggctagctcgatttggacccttcacaagttagccttgtcctttgatcctgcagttgagattttccaagttgaaagcggagtggaattttcgattgttttcatggagaatgtcttaaaaagaaaacaagataagaagttttcgatgagtcctactcgagccaaagtaggattcacagtggttcccgggtttaaaatcgggtgcaccgtgattcagtgtcaagtttaccttaccggcggctccaaaatgtaaatgaaagagaccgatggttaagccggcgctcaagtttcttttcacaaagctgcttcaagaacttggcagctcacgaagactatatgagttataacttttttaccttcttccttttctgtgattaattgtgttcctttaagtctgatttgagttcttgatttcgttttaaagtgtacagaaggttctaaagctatggtgatttttttctttgtttgaattgcaatgaattcaattgtttctctttatcgtagtaagatgtaacagattgattatcaaaatatagtcagtttttcacaat

SEQ ID NO: 34399 - protein, 499 aa, Arabidopsis thaliana
  misc_feature (1)..(499): Ceres Seq. ID no. 13606071
MREVETTAITAAPPQFSQMFQKLAMAVKTKTYEFFTEDDNERTDAEGFSLLDSSEDFITDQKVVVLKPDKPLLSASSPGSPIESPVNDVQTKNLGVVSVVKPNQKKLSQVRKLDTQMGLSLISSVFATASSFEASYLQLQAAHAPFVEENVKAADRALVSNLQKLSDLKQFYRNYRQSLDFESDLAIGSCLESRVQENQSKLRALETVSNRLQAEMDAKDLQVWSLRNKLGEIQKSTSKLSKRLSSNSSLDVLLSVRVFESLLYDAFKATQKFTKILIELMEKAGWDLDLVAKSVHPEVDYAKERHNRYALLSYVCLGMFRGFDGEGFDLNENDYEESERSSVDSSLRELMQHVSSNPMELLDRDKDCAFSRFCDKKYHELIHPNMASSIFSNMDENEAVLSSWRSLSTFYESFVTMASSIWTLHKLALSFDPAVEIFQVESGVEFSIVFMENVLKRKQDKKFSMSPTRAKVGFTVVPGFKIGCTVIQCQVYLTGGSKM

SEQ ID NO: 34400 - protein, 481 aa, Arabidopsis thaliana
  misc_feature (1)..(481): Ceres Seq. ID no. 13606072
MFQKLAMAVKTKTYEFFTEDDNERTDAEGFSLLDSSEDFITDQKVVVLKPDKPLLSASSPGSPIESPVNDVQTKNLGVVSVVKPNQKKLSQVRKLDTQMGLSLISSVFATASSFEASYLQLQAAHAPFVEENVKAADRALVSNLQKLSDLKQFYRNYRQSLDFESDLAIGSCLESRVQENQSKLRALETVSNRLQAEMDAKDLQVWSLRNKLGEIQKSTSKLSKRLSSNSSLDVLLSVRVFESLLYDAFKATQKFTKILIELMEKAGWDLDLVAKSVHPEVDYAKERHNRYALLSYVCLGMFRGFDGEGFDLNENDYEESERSSVDSSLRELMQHVSSNPMELLDRDKDCAFSRFCDKKYHELIHPNMASSIFSNMDENEAVLSSWRSLSTFYESFVTMASSIWTLHKLALSFDPAVEIFQVESGVEFSIVFMENVLKRKQDKKFSMSPTRAKVGFTVVPGFKIGCTVIQCQVYLTGGSKM

SEQ ID NO: 34401 - protein, 475 aa, Arabidopsis thaliana
  misc_feature (1)..(475): Ceres Seq. ID no. 13606073
MAVKTKTYEFFTEDDNERTDAEGFSLLDSSEDFITDQKVVVLKPDKPLLSASSPGSPIESPVNDVQTKNLGVVSVVKPNQKKLSQVRKLDTQMGLSLISSVFATASSFEASYLQLQAAHAPFVEENVKAADRALVSNLQKLSDLKQFYRNYRQSLDFESDLAIGSCLESRVQENQSKLRALETVSNRLQAEMDAKDLQVWSLRNKLGEIQKSTSKLSKRLSSNSSLDVLLSVRVFESLLYDAFKATQKFTKILIELMEKAGWDLDLVAKSVHPEVDYAKERHNRYALLSYVCLGMFRGFDGEGFDLNENDYEESERSSVDSSLRELMQHVSSNPMELLDRDKDCAFSRFCDKKYHELIHPNMASSIFSNMDENEAVLSSWRSLSTFYESFVTMASSIWTLHKLALSFDPAVEIFQVESGVEFSIVFMENVLKRKQDKKFSMSPTRAKVGFTVVPGFKIGCTVIQCQVYLTGGSKM

SEQ ID NO: 34402 - DNA, 1784 bp, Arabidopsis thaliana
  misc_feature (1)..(1784): Ceres Seq. ID no. 13606082
gttatcttcatacttttgtgttgcgtttctgttgattctccttttatgtatcctctcggctctctcgttaatcttttattacataaactcgtgcatcaacataaacacaaaacagaagcatgaagatgaataacaacgacggccaacataataaaacggtgacatttcctcgaaaaagcatcgtgaaggctactgttttcatcgtcgttctattcatttcagctgctatcttagacttactgggctatctcgatttcaatgcttttgcaggtttaaagctaacaacaaagacaaaagaaccaaatccttacggatgcgacttcgtacagaaccaatcaagtcaaactcctatctcacaaaaccgcaaatcgagattaaaccccaacaacagttcaaaatcatccacgtgtccttcttatttccgttggatccatgaagatctacggccatggaaacaaacggggataactagagggatgatcgaagaagcgagtagaacggcgcattttagattggtgatccgtaacgggaaggcgtacgttaagagatataagaagtcaatacaaacaagagatgaatttactctgtggggaatcttacagttgttacggtggtaccctggtaaattacctgatctcgagctaatgttcgacgctgatgatcgtcccgtcgtccgatcagttgactttattggtcaacagaaggaaccacctccagttttccgttactgttcagatgacgcaagcttggacattgtcttccctgattggtccttttggggctgggctgaagtgaacgtaaaaccatgggggaaatcgttggaggcaataaaagaagggaacagtatgacgcaatggaaggaccgcgtggcgtacgcttattggagaggtaatccttatgttgatcctggaagaggagatcttctcaagtgtaatgctacagaacatgaagagtggaatactcgtctctatattcaggattgggataaagaaacaaaagaaggattcaagaactcaaatctagagaaccagtgcactcatagatacaagatatatatagaaggatgggcatggtcggttagcgagaaatacataatggcatgtgactcaatgacattatatgtaaaaccaagattctacgatttctacatacgaggaatgatgccattacaacattattggccaatcagagacgattccaagtgtacttctctcaaattcgccgtacattggggcaatacacacgaggacaaggctcgtgagataggagaggtaggaagtagatttataagagaggaggtgaatatgcagtatgtgtatgactatatgtttcatttactcaaagagtatgcaacactcttgaaatttaagccggagattccgttagatgcagaggagatcacgccggatagtatggggtgtcccgcgacggaaaggtggagagattttaaggcggagtcaatgattatatctcctagtgaagagtctccttgtgagatgcttcctccttatgatcctctagctttaaaagaggttcttgagagaaaagctaatttaactcgtcaggttgagttgtgggaaaaccaatactttcaaaatcttaccaacaaaccttaaattgttttgttttttccttcttcgttgacgagatcaaccgcaaccaaatagttcagtcgtgggaggatcaatactctcttgatttgacttataaaccttgattttttttttctatcatcattaaccatttgtcgaatatacttttcaaagtatactttgtttatggcc

SEQ ID NO: 34403 - protein, 498 aa, Arabidopsis thaliana
  misc_feature (1)..(498): Ceres Seq. ID no. 13606083
MKMNNNDGQHNKTVTFPRKSIVKATVFIVVLFISAAILDLLGYLDFNAFAGLKLTTKTKEPNPYGCDFVQNQSSQTPISQNRKSRLNPNNSSKSSTCPSYFRWIHEDLRPWKQTGITRGMIEEASRTAHFRLVIRNGKAYVKRYKKSIQTRDEFTLWGILQLLRWYPGKLPDLELMFDADDRPVVRSVDFIGQQKEPPPVFRYCSDDASLDIVFPDWSFWGWAEVNVKPWGKSLEAIKEGNSMTQWKDRVAYAYWRGNPYVDPGRGDLLKCNATEHEEWNTRLYIQDWDKETKEGFKNSNLENQCTHRYKIYIEGWAWSVSEKYIMACDSMTLYVKPRFYDFYIRGMMPLQHYWPIRDDSKCTSLKFAVHWGNTHEDKAREIGEVGSRFIREEVNMQYVYDYMFHLLKEYATLLKFKPEIPLDAEEITPDSMGCPATERWRDFKAESMIISPSEESPCEMLPPYDPLALKEVLERKANLTRQVELWENQYFQNLTNKP

SEQ ID NO: 34404 - protein, 496 aa, Arabidopsis thaliana
  misc_feature (1)..(496): Ceres Seq. ID no. 13606084
MNNNDGQHNKTVTFPRKSIVKATVFIVVLFISAAILDLLGYLDFNAFAGLKLTTKTKEPNPYGCDFVQNQSSQTPISQNRKSRLNPNNSSKSSTCPSYFRWIHEDLRPWKQTGITRGMIEEASRTAHFRLVIRNGKAYVKRYKKSIQTRDEFTLWGILQLLRWYPGKLPDLELMFDADDRPVVRSVDFIGQQKEPPPVFRYCSDDASLDIVFPDWSFWGWAEVNVKPWGKSLEAIKEGNSMTQWKDRVAYAYWRGNPYVDPGRGDLLKCNATEHEEWNTRLYIQDWDKETKEGFKNSNLENQCTHRYKIYIEGWAWSVSEKYIMACDSMTLYVKPRFYDFYIRGMMPLQHYWPIRDDSKCTSLKFAVHWGNTHEDKAREIGEVGSRFIREEVNMQYVYDYMFHLLKEYATLLKFKPEIPLDAEEITPDSMGCPATERWRDFKAESMIISPSEESPCEMLPPYDPLALKEVLERKANLTRQVELWENQYFQNLTNKP

SEQ ID NO: 34405 - protein, 379 aa, Arabidopsis thaliana
  misc_feature (1)..(379): Ceres Seq. ID no. 13606085
MIEEASRTAHFRLVIRNGKAYVKRYKKSIQTRDEFTLWGILQLLRWYPGKLPDLELMFDADDRPVVRSVDFIGQQKEPPPVFRYCSDDASLDIVFPDWSFWGWAEVNVKPWGKSLEAIKEGNSMTQWKDRVAYAYWRGNPYVDPGRGDLLKCNATEHEEWNTRLYIQDWDKETKEGFKNSNLENQCTHRYKIYIEGWAWSVSEKYIMACDSMTLYVKPRFYDFYIRGMMPLQHYWPIRDDSKCTSLKFAVHWGNTHEDKAREIGEVGSRFIREEVNMQYVYDYMFHLLKEYATLLKFKPEIPLDAEEITPDSMGCPATERWRDFKAESMIISPSEESPCEMLPPYDPLALKEVLERKANLTRQVELWENQYFQNLTNKP

SEQ ID NO: 34406 - DNA, 1373 bp, Arabidopsis thaliana
  misc_feature (1)..(1373): Ceres Seq. ID no. 13606112
atagcctcactaaacatctcttgttattttcgaaagtgaagagaaaaatggtggatctattgaactcggtgatgaacctggtggcgcctccagcgaccatggtggtgatggcctttgcatggccattactgtctttcattagcttctccgaacgggcttacaactcttatttcgccaccgaaaatatggaagataaagtagttgtcatcaccggagcttcatcggccattggagagcaaatagcatatgaatatgcaaaaagaggagcgaatttggtgttggtggcgaggagagagcagagactgagagttgtgagtaataaggctaaacagattggagccaaccatgtgatcatcatcgctgctgatgtcatcaaagaagatgactgccgccgttttatcacccaagccgtcaactattacggccgcgtggatcatctagtgaatacagcgagtcttggacacactttttactttgaggaagtgagtgacacgactgtgtttccacatttgctggacataaacttctgggggaatgtttatccgacatacgtagcgttgccataccttcaccagacgaatggccgaatagtcgtgaatgcatcggttgaaaactggttgcctctaccacggatgagtctttattctgctgcaaaagcagcattagtcaacttctatgagacgctgcgtttcgagctaaatggagacgttggtataactatcgcgactcacgggtggattggcagtgagatgagtggaggaaagttcatgctagaagaaggtgctgagatgcaatggaaggaagagagagaagtacctgcaaatggtggaccgctagaggaatttgcaaagatgattgtggcaggagcttgtaggggagatgcatatgtgaagtttccaaactggtacgatgtctttctcctctatcgagtcttcacaccgaatgtactgagatggacattcaagttgttactgtctactgagggtacacgtagaagctcccttgttggggtcgggtcaggtatgcctgtggatgaatcctcttcacaaatgaaacttatgcttgaaggaggaccacctcgagttcctgcaagcccacctaggtataccgcaagcccacctcattataccgcaagcccaccacggtatcctgcaagcccacctcggtatcctgcgagcccacctcggttttcacagtttaatatccaagagttgtaataaaaactggatggaggaacaagaggtgaggtcggtttggtgtgtagagtgtagagtgaacttgagctttagaactttctctgaccaagtgaaccacaaaaaaagaaaagcaatgtaaaggacatcgagtcaagaataataccggatgatacagcc

SEQ ID NO: 34407 - protein, 404 aa, Arabidopsis thaliana
  misc_feature (1)..(404): Ceres Seq. ID no. 13606113
SLTKHLLLFSKVKRKMVDLLNSVMNLVAPPATMVVMAFAWPLLSFISFSERAYNSYFATENMEDKVVVITGASSAIGEQIAYEYAKRGANLVLVARREQRLRVVSNKAKQIGANHVIIIAADVIKEDDCRRFITQAVNYYGRVDHLVNTASLGHTFYFEEVSDTTVFPHLLDINFWGNVYPTYVALPYLHQTNGRIVVNASVENWLPLPRMSLYSAAKAALVNFYETLRFELNGDVGITIATHGWIGSEMSGGKFMLEEGAEMQWKEEREVPANGGPLEEFAKMIVAGACRGDAYVKFPNWYDVFLLYRVFTPNVLRWTFKLLLSTEGTRRSSLVGVGSGMPVDESSSQMKLMLEGGPPRVPASPPRYTASPPHYTASPPRYPASPPRYPASPPRFSQFNIQEL

SEQ ID NO: 34408 - protein, 389 aa, Arabidopsis thaliana
  misc_feature (1)..(389): Ceres Seq. ID no. 13606114
MVDLLNSVMNLVAPPATMVVMAFAWPLLSFISFSERAYNSYFATENMEDKVVVITGASSAIGEQIAYEYAKRGANLVLVARREQRLRVVSNKAKQIGANHVIIIAADVIKEDDCRRFITQAVNYYGRVDHLVNTASLGHTFYFEEVSDTTVFPHLLDINFWGNVYPTYVALPYLHQTNGRIVVNASVENWLPLPRMSLYSAAKAALVNFYETLRFELNGDVGITIATHGWIGSEMSGGKFMLEEGAEMQWKEEREVPANGGPLEEFAKMIVAGACRGDAYVKFPNWYDVFLLYRVFTPNVLRWTFKLLLSTEGTRRSSLVGVGSGMPVDESSSQMKLMLEGGPPRVPASPPRYTASPPHYTASPPRYPASPPRYPASPPRFSQFNIQEL

SEQ ID NO: 34409 - protein, 381 aa, Arabidopsis thaliana
  misc_feature (1)..(381): Ceres Seq. ID no. 13606115
MNLVAPPATMVVMAFAWPLLSFISFSERAYNSYFATENMEDKVVVITGASSAIGEQIAYEYAKRGANLVLVARREQRLRVVSNKAKQIGANHVIIIAADVIKEDDCRRFITQAVNYYGRVDHLVNTASLGHTFYFEEVSDTTVFPHLLDINFWGNVYPTYVALPYLHQTNGRIVVNASVENWLPLPRMSLYSAAKAALVNFYETLRFELNGDVGITIATHGWIGSEMSGGKFMLEEGAEMQWKEEREVPANGGPLEEFAKMIVAGACRGDAYVKFPNWYDVFLLYRVFTPNVLRWTFKLLLSTEGTRRSSLVGVGSGMPVDESSSQMKLMLEGGPPRVPASPPRYTASPPHYTASPPRYPASPPRYPASPPRFSQFNIQEL

SEQ ID NO: 34410 - DNA, 1259 bp, Arabidopsis thaliana
  misc_feature (1)..(1259): Ceres Seq. ID no. 13606118
attatcgctctcacttcagattttaaaccaatcatggcagcatcaaaactcctcgtatccgacatcgcctctgtcgttgatcacgtcccttcaaactacgtcagaccagtctctgaccgtccaaaaatgtccgaggttcaaacttccggcgactctattcctctaatcgatctccacgacctccatggacctaatcgagctgacattatcaatcagtttgctcatgcatgctcttcttgtggcttcttccagatcaagaaccatggagtaccagaagaaacgatcaaaaaaatgatgaatgcggcaagagagtttttccggcaatcagagagcgaaagagtgaagcattactcagcagataccaaaaagacaacgagactctccacaagtttcaacgtttccaaagagaaagtctctaactggagagacttccttcgactccattgctaccctatcgaagatttcatcaatgaatggccctcaacaccgatctctttcagagaagtcacagccgaatacgctacaagcgttagagccttggttctgacacttcttgaggcaatctcagagagcttaggtcttgcgaaagaccgtgtaagcaatacaataggcaaacatggtcaacacatggctattaactactatccccggtgtcctcaaccagagctaacttacggacttccggggcataaagatgcaaacttgatcactgttcttcttcaagatgaagtctctggtttacaggtgtttaaagatggtaaatggatcgctgttaatcctgttcccaacactttcatagtcaaccttggtgaccaaatgcaggttataagcaatgaaaaatacaagagtgttcttcacagagcggttgtgaacagcgacatggagcggatatcgataccgacattctactgtccttctgaagatgctgtgattagtccagcacaagagctgatcaatgaggaagaagactctcctgctatttacagaaactttacatatgctgaatattttgaaaagttttgggacacagcatttgatactgagagctgtattgactcgttcaaagcatccaccgcctaagatagtgtactatcgaatcaatcatccgtcatgactaggccggtccttagttcttgattggaactcaaatacccatttgtgttgccatttcaagatcagtatagttttctttaatgaacaaatctgcctgagaagtaaaacaaactgttcttgcaacattttgaaatcattatgttttt

SEQ ID NO: 34411 - protein, 359 aa, Arabidopsis thaliana
  misc_feature (1)..(359): Ceres Seq. ID no. 13606119
IIALTSDFKPIMAASKLLVSDIASVVDHVPSNYVRPVSDRPKMSEVQTSGDSIPLIDLHDLHGPNRADIINQFAHACSSCGFFQIKNHGVPEETIKKMMNAAREFFRQSESERVKHYSADTKKTTRLSTSFNVSKEKVSNWRDFLRLHCYPIEDFINEWPSTPISFREVTAEYATSVRALVLTLLEAISESLGLAKDRVSNTIGKHGQHMAINYYPRCPQPELTYGLPGHKDANLITVLLQDEVSGLQVFKDGKWIAVNPVPNTFIVNLGDQMQVISNEKYKSVLHRAVVNSDMERISIPTFYCPSEDAVISPAQELINEEEDSPAIYRNFTYAEYFEKFWDTAFDTESCIDSFKASTA

SEQ ID NO: 34412 - protein, 348 aa, Arabidopsis thaliana
  misc_feature (1)..(348): Ceres Seq. ID no. 13606120
MAASKLLVSDIASVVDHVPSNYVRPVSDRPKMSEVQTSGDSIPLIDLHDLHGPNRADIINQFAHACSSCGFFQIKNHGVPEETIKKMMNAAREFFRQSESERVKHYSADTKKTTRLSTSFNVSKEKVSNWRDFLRLHCYPIEDFINEWPSTPISFREVTAEYATSVRALVLTLLEAISESLGLAKDRVSNTIGKHGQHMAINYYPRCPQPELTYGLPGHKDANLITVLLQDEVSGLQVFKDGKWIAVNPVPNTFIVNLGDQMQVISNEKYKSVLHRAVVNSDMERISIPTFYCPSEDAVISPAQELINEEEDSPAIYRNFTYAEYFEKFWDTAFDTESCIDSFKASTA

SEQ ID NO: 34413 - protein, 317 aa, Arabidopsis thaliana
  misc_feature (1)..(317): Ceres Seq. ID no. 13606121
MSEVQTSGDSIPLIDLHDLHGPNRADIINQFAHACSSCGFFQIKNHGVPEETIKKMMNAAREFFRQSESERVKHYSADTKKTTRLSTSFNVSKEKVSNWRDFLRLHCYPIEDFINEWPSTPISFREVTAEYATSVRALVLTLLEAISESLGLAKDRVSNTIGKHGQHMAINYYPRCPQPELTYGLPGHKDANLITVLLQDEVSGLQVFKDGKWIAVNPVPNTFIVNLGDQMQVISNEKYKSVLHRAVVNSDMERISIPTFYCPSEDAVISPAQELINEEEDSPAIYRNFTYAEYFEKFWDTAFDTESCIDSFKASTA

SEQ ID NO: 34414 - DNA, 3027 bp, Arabidopsis thaliana
  misc_feature (1)..(3027): Ceres Seq. ID no. 13606137
atggcttctgttttgcttccattgccacaagtatttgttttgtttgattatcgcaggagccgtaaagagtcaagctttccccgcgccgtctacaattccaattccatttcttctaattcaaccaatgccaatcatttccttcgccggatttctaacttctgtgaaaccggagacctcgacaagtcctttcgaactgtccaagaattcgttggcgatgacgagagctcgtccgatgcgtttcttcttgtccgagaagctcttgggcttctcttacaagcttctgggaagagaaaagacattgaaatgggaagaaagatccaccagctggtttctgggtcgacccggttaaggaatgatgacgttctctgtactcgtattatcaccatgtacgctatgtgtggctctcctgatgattctcggtttgtgtttgatgccttgcggagtaagaatctcttccagtggaatgctgttatcagctcttactcaagaaacgagctttacgatgaagtattagagacgtttatcgagatgatctcaacgactgatcttttaccggatcatttcacttatccatgtgtgattaaggcttgtgctgggatgtctgatgttgggatcgggcttgcggttcatgggttggtggtgaagaccggattggtggaagatgtttttgtgggtaatgcattggtgtctttctatggaactcatggttttgttactgatgccttgcaactgttcgatataatgcctgagagaaatttggtttcctggaactccatgattcgagtgttctcggataatggtttctcagaagaaagcttcttgcttcttggagaaatgatggaggaaaatggtgatggtgcgtttatgccggatgttgctacacttgttactgtgttgccggtttgtgcaagagaaagagaaatagggttgggaaaaggtgttcatgggtgggcggtgaaattgaggttggacaaggaactagtccttaacaatgccttaatggacatgtactccaaatgcggttgcattactaatgcacaaatgatctttaagatgaacaataacaagaatgtggtttcttggaacacaatggtaggaggtttttcagcagagggtgatacacatgggacgtttgatgttctgagacagatgctggcaggaggcgaagatgtcaaagcggacgaggtaaccattctaaatgcagtgcctgtttgtttccatgaatcattcttaccgagtttaaaggaacttcattgttactccttaaaacaagagtttgtatacaatgagttagtagccaatgcctttgtggcttcttatgcaaagtgtggctcactgagttatgcccagcgtgtgtttcatggtataaggagtaaaacagtgaactcttggaatgctttgattggcggccatgctcagagcaatgatccgagattgtccttggatgctcatttgcagatgaaaatttctggattgctacctgatagttttactgtctgtagtcttctttcagcttgttctaaactaaaatccctgcggttgggaaaggaagtgcatgggtttataatccgaaattggttagaaagagatttgtttgtttatttatcagtactctcattatacattcattgtggggagctatgcactgtacaagcattatttgatgcaatggaagataaaagcttagtatcttggaatactgtaatcaccggttaccttcagaatggatttcctgatagagctttgggcgtctttagacaaatggttttgtatggaatccagctttgtgggatttctatgatgcctgtgtttggtgcgtgttcgctgctaccttctcttcgactggggagagaagcgcatgcttatgctttgaagcacctcctggaggacgatgcgtttattgcatgttctttaattgatatgtatgccaagaatggttctataacacaatcatctaaggttttcaatggcttgaaggagaaaagcacggcatcttggaatgccatgataatgggatatggaatacatggcctagcaaaagaggctataaaactctttgaagagatgcaaagaacaggtcataaccctgatgacctaactttcttaggtgttctaacggcttgcaaccatagtggtctgatccatgaagggctgagatatctggatcaaatgaagtcttcttttgggctaaagccaaatttaaagcattatgcttgtgtcattgacatgttaggccgagctgggcaactagacaaggctctaagggttgttgcagaagagatgtctgaggaagctgacgttggaatttggaagtctctgctcagctcatgcagaatccatcaaaatctggaaatgggagagaaagttgctgctaagttattcgaattagaaccagaaaagcctgagaattatgttctgctttccaacttatatgcaggattggggaaatgggaagacgtgagaaaagtgagacagagaatgaacgagatgagtttacgaaaggatgctggatgctcttggatcgaactaaacaggaaggtatttagctttgttgtcggtgaaagattcttagatggttttgaggaaatcaaaagtctttggagtatattggagatgaagatatcgaagatgggatacagaccagacacaatgtcagtacaacatgatctaagtgaagaggagaagattgaacagttaaggggacacagcgagaagcttgcccttacctacgggttgattaaaacttcagaaggaacaactattagagtttacaagaacctaaggatctgtgtggactgtcacaatgcagcaaagttgatctccaaggtcatggaaagggaaatagttgtgagggacaacaaaaggtttcatcatttcaagaatggggtttgttcttgtggagattactggtaagtaggactgtaataaaattggtgaaaacagatgcattagtaatagtagctcttagtaaattcagtattgtgtgtatttatgttcaggcgagacaaacatcaatgttaatatgtt

SEQ ID NO: 34415 - protein, 970 aa, Arabidopsis thaliana
  misc_feature (1)..(970): Ceres Seq. ID no. 13606138
MASVLLPLPQVFVLFDYRRSRKESSFPRAVYNSNSISSNSTNANHFLRRISNFCETGDLDKSFRTVQEFVGDDESSSDAFLLVREALGLLLQASGKRKDIEMGRKIHQLVSGSTRLRNDDVLCTRIITMYAMCGSPDDSRFVFDALRSKNLFQWNAVISSYSRNELYDEVLETFIEMISTTDLLPDHFTYPCVIKACAGMSDVGIGLAVHGLVVKTGLVEDVFVGNALVSFYGTHGFVTDALQLFDIMPERNLVSWNSMIRVFSDNGFSEESFLLLGEMMEENGDGAFMPDVATLVTVLPVCAREREIGLGKGVHGWAVKLRLDKELVLNNALMDMYSKCGCITNAQMIFKMNNNKNVVSWNTMVGGFSAEGDTHGTFDVLRQMLAGGEDVKADEVTILNAVPVCFHESFLPSLKELHCYSLKQEFVYNELVANAFVASYAKCGSLSYAQRVFHGIRSKTVNSWNALIGGHAQSNDPRLSLDAHLQMKISGLLPDSFTVCSLLSACSKLKSLRLGKEVHGFIIRNWLERDLFVYLSVLSLYIHCGELCTVQALFDAMEDKSLVSWNTVITGYLQNGFPDRALGVFRQMVLYGIQLCGISMMPVFGACSLLPSLRLGREAHAYALKHLLEDDAFIACSLIDMYAKNGSITQSSKVFNGLKEKSTASWNAMIMGYGIHGLAKEAIKLFEEMQRTGHNPDDLTFLGVLTACNHSGLIHEGLRYLDQMKSSFGLKPNLKHYACVIDMLGRAGQLDKALRVVAEEMSEEADVGIWKSLLSSCRIHQNLEMGEKVAAKLFELEPEKPENYVLLSNLYAGLGKWEDVRKVRQRMNEMSLRKDAGCSWIELNRKVFSFVVGERFLDGFEEIKSLWSILEMKISKMGYRPDTMSVQHDLSEEEKIEQLRGHSEKLALTYGLIKTSEGTTIRVYKNLRICVDCHNAAKLISKVMEREIVVRDNKRFHHFKNGVCSCGDYW

SEQ ID NO: 34416 - protein, 869 aa, Arabidopsis thaliana
  misc_feature (1)..(869): Ceres Seq. ID no. 13606139
MGRKIHQLVSGSTRLRNDDVLCTRIITMYAMCGSPDDSRFVFDALRSKNLFQWNAVISSYSRNELYDEVLETFIEMISTTDLLPDHFTYPCVIKACAGMSDVGIGLAVHGLVVKTGLVEDVFVGNALVSFYGTHGFVTDALQLFDIMPERNLVSWNSMIRVFSDNGFSEESFLLLGEMMEENGDGAFMPDVATLVTVLPVCAREREIGLGKGVHGWAVKLRLDKELVLNNALMDMYSKCGCITNAQMIFKMNNNKNVVSWNTMVGGFSAEGDTHGTFDVLRQMLAGGEDVKADEVTILNAVPVCFHESFLPSLKELHCYSLKQEFVYNELVANAFVASYAKCGSLSYAQRVFHGIRSKTVNSWNALIGGHAQSNDPRLSLDAHLQMKISGLLPDSFTVCSLLSACSKLKSLRLGKEVHGFIIRNWLERDLFVYLSVLSLYIHCGELCTVQALFDAMEDKSLVSWNTVITGYLQNGFPDRALGVFRQMVLYGIQLCGISMMPVFGACSLLPSLRLGREAHAYALKHLLEDDAFIACSLIDMYAKNGSITQSSKVFNGLKEKSTASWNAMIMGYGIHGLAKEAIKLFEEMQRTGHNPDDLTFLGVLTACNHSGLIHEGLRYLDQMKSSFGLKPNLKHYACVIDMLGRAGQLDKALRVVAEEMSEEADVGIWKSLLSSCRIHQNLEMGEKVAAKLFELEPEKPENYVLLSNLYAGLGKWEDVRKVRQRMNEMSLRKDAGCSWIELNRKVFSFVVGERFLDGFEEIKSLWSILEMKISKMGYRPDTMSVQHDLSEEEKIEQLRGHSEKLALTYGLIKTSEGTTIRVYKNLRICVDCHNAAKLISKVMEREIVVRDNKRFHHFKNGVCSCGDYW

SEQ ID NO: 34417 - protein, 842 aa, Arabidopsis thaliana
  misc_feature (1)..(842): Ceres Seq. ID no. 13606140
MYAMCGSPDDSRFVFDALRSKNLFQWNAVISSYSRNELYDEVLETFIEMISTTDLLPDHFTYPCVIKACAGMSDVGIGLAVHGLVVKTGLVEDVFVGNALVSFYGTHGFVTDALQLFDIMPERNLVSWNSMIRVFSDNGFSEESFLLLGEMMEENGDGAFMPDVATLVTVLPVCAREREIGLGKGVHGWAVKLRLDKELVLNNALMDMYSKCGCITNAQMIFKMNNNKNVVSWNTMVGGFSAEGDTHGTFDVLRQMLAGGEDVKADEVTILNAVPVCFHESFLPSLKELHCYSLKQEFVYNELVANAFVASYAKCGSLSYAQRVFHGIRSKTVNSWNALIGGHAQSNDPRLSLDAHLQMKISGLLPDSFTVCSLLSACSKLKSLRLGKEVHGFIIRNWLERDLFVYLSVLSLYIHCGELCTVQALFDAMEDKSLVSWNTVITGYLQNGFPDRALGVFRQMVLYGIQLCGISMMPVFGACSLLPSLRLGREAHAYALKHLLEDDAFIACSLIDMYAKNGSITQSSKVFNGLKEKSTASWNAMIMGYGIHGLAKEAIKLFEEMQRTGHNPDDLTFLGVLTACNHSGLIHEGLRYLDQMKSSFGLKPNLKHYACVIDMLGRAGQLDKALRVVAEEMSEEADVGIWKSLLSSCRIHQNLEMGEKVAAKLFELEPEKPENYVLLSNLYAGLGKWEDVRKVRQRMNEMSLRKDAGCSWIELNRKVFSFVVGERFLDGFEEIKSLWSILEMKISKMGYRPDTMSVQHDLSEEEKIEQLRGHSEKLALTYGLIKTSEGTTIRVYKNLRICVDCHNAAKLISKVMEREIVVRDNKRFHHFKNGVCSCGDYW

SEQ ID NO: 34418 - DNA, 1106 bp, Arabidopsis thaliana
  misc_feature (1)..(1106): Ceres Seq. ID no. 13606141
attcgaacaattaccgacacacaaaaagtttgaagagaaaaacaaaaaatgttgtcgagattgttcaaggcaggtgaaaaggttttgtcgaatctcgttagcaagaaagacatttacatggcgtcgaggaatcaggagaaatctcccaaagtgcaagagctttacgacctctgcaaagagactttcactggcaaagctccttctcctgcttccatggctatccaaaagctatgctctgtgttggactcagttagtcctgcagatgttgggcttgaagaggtatctcaagacgatgatcgaggctatggagtttctggggttagccgtttcaatagagtaggacgatgggcacaaccgataacattcttagacattcatgaatgtgatacttttacaatgtgtattttctgcttcccaacgtcttcagtgatcccattgcatgatcatccagagatggctgtgtttagtaaaatcctctatggatcacttcatgttaaagcttacgattgggtcgaacctccatgtattatcacacaagataaaggcgtccccggttctcttccagcaaggttggcgaaattggtgagtgacaaagttataacgcctcagtctgagataccggcgttgtacccaaagactggaggcaatctccattgcttcactgcgttgactccatgtgctgtgctcgacattctctcacctccttacaaagaaagtgttggcaggagttgcagttactacatggactatccgttttccactttcgcattggagaacggaatgaagaaggtggatgaaggaaaggaagacgaatacgcatggcttgtacagattgacacgcccgatgatcttcacatgcgtcccggatcatatactggtccaactatcagagtctagatatttgtggtttgttttgtagcaaagtagagcaactcttgtaacattccaagataagtttctggagaagatatcaatacgatttcagattaaagatgaactctttgtttagtccatgtccacttctcagttctcacacgcattcaagcaaatgaaactgcggaaaactacaaatagatcggcaatgagaaatgttaagatttcatttc

SEQ ID NO: 34419 - protein, 282 aa, Arabidopsis thaliana [sequence omitted]

SEQ ID NO: 34420 - protein, 259 aa, Arabidopsis thaliana
  misc_feature (1)..(259): Ceres Seq. ID no. 13606143
MASRNQEKSPKVQELYDLCKETFTGKAPSPASMAIQKLCSVLDSVSPADVGLEEVSQDDDRGYGVSGVSRFNRVGRWAQPITFLDIHECDTFTMCIFCFPTSSVIPLHDHPEMAVFSKILYGSLHVKAYDWVEPPCIITQDKGVPGSLPARLAKLVSDKVITPQSEIPALYPKTGGNLHCFTALTPCAVLDILSPPYKESVGRSCSYYMDYPFSTFALENGMKKVDEGKEDEYAWLVQIDTPDDLHMRPGSYTGPTIRV

SEQ ID NO: 34421 - protein, 227 aa, Arabidopsis thaliana
  misc_feature (1)..(227): Ceres Seq. ID no. 13606144
MAIQKLCSVLDSVSPADVGLEEVSQDDDRGYGVSGVSRFNRVGRWAQPITFLDIHECDTFTMCIFCFPTSSVIPLHDHPEMAVFSKILYGSLHVKAYDWVEPPCIITQDKGVPGSLPARLAKLVSDKVITPQSEIPALYPKTGGNLHCFTALTPCAVLDILSPPYKESVGRSCSYYMDYPFSTFALENGMKKVDEGKEDEYAWLVQIDTPDDLHMRPGSYTGPTIRV

SEQ ID NO: 34422 - DNA, 3256 bp, Arabidopsis thaliana
  misc_feature (1)..(3256): Ceres Seq. ID no. 13606149
agaaccaggaggaaacattttgcagaggatttactggaagcacaataaagaagagttaagacactgtcactacagagagaagagttcaaattctctcctttttgttaccagtagcaagttccggcgcaggagattcgccggagaaccctcctggtttcaggtgaacttctagctatttttcaccattcatggctgcaaagcttcttcatacattggcagatgaaaactcggatctgcagaagaaaattggatgtatgaatgggattttccaaatctttgatcgacaccatattctcacaagccggcgtaaaagtcttactttaggtaatgcacatgtcaatagtatcaactttgaaagagactctgttgatgcaatttgtcagcaaagatcagcatttcagtgtcaggactcaaaccttgttagcagtaatggattgagcgagaaactaacgaggctatcaaccgaatgttcgagggtttctttctcatcatcgtgttcatcatcttccccgttgtcttccgaggtcaacagagaagttcagcctgagatttctgcggatgaccgagtcatttttccagaatctcctacaagtgatccagtgatgagccaaggaactggtgctcgtgtgggacttgaccttagagatgttgttagagattctatgtatagagaagctagagggctttctgatgtatgtaggcaaaacagaagagaggattctccaagaccctatggtttgaagcaatccaggcctgttgatttcaatgaatcctgcagagctctagccaaacttagaaaaacatctcatcactattacaatgaggttgacatgaaagatacatcccgttactatgttgattctcgcggaaagtcgaaatccgggaagaagctgaaagagttgcctaggctttcgttggacagtagagaccacgttgatctcaaatcaggtaataaactttctgaaagtttcagtagaagctctagcatgaacaaagtttcaggtagcccgaaacggcctcctagtgttgttgccaagctaatgggcttggaaacattaccgggttctcctttgagcagagacagattcaacatgtttgatgataacagtgatccattcgcaagatcattgagggaaaatagcctgaaccgttctcttcggttctctcctagctcgcccagaagcttaggaaaggaccctgctgcttcttcttcttctccaagatggagaagctctgagtttgttatgaaacccttatcaagtttgagatatcccattgaaccagctccttggaagcaaaccgagagaaaccggttttctcaaaagcaagcctgcaggtctgtgaaatctctgtcacagtcgatggagggaaaattgaaagatcttgaggttaaacattcgggaaaggatctcagagctcttaaagatatattagaggcaatgcaatcaaaaggtctctttgatactcgaaagcaacaacaatgctcaaacttggaagctcaaagagattacgaactggcagattctgcaacttctaagcatgattcaatagacctgagaaacccggtgattccatccaatatgagaggtccaattgtgataatgaaacctgccagacttgttgaaaaatctggtatcccttcatcatctctgattcccattcacagtctatccggtcttaataagacctgcagagaagaacctgtaaatgttagaagaagttcaacaagtagaaaggcagtaaaagatcgtagtcctggaaaccaaagagctgaaccatgtatcagttctgacaagaaatctagcagcagaaacgtgatgtcttctcaggtttacaaagaaagcacttcaaagaattcagggcctgcaagttcaaagttgcagcagatgaagcctgagcatgacaagcgttctcgaccaccagcctctccatctgattcaagcaaattaagaaaacaaataagccgacaacccgtggaatctactacttctcctggtgggaggcgtagtagacccagggatcagaggagcttgcagcaaaatgatggccaacttagccaaatgagcaataaatctaggactaaaatagaagccaccttgagtatcgaaaatggtggaaagagcccatctgttatagaggcagccaaagctgtagtctctaacttaatacagaataagtccagtccaacgtttagtgaagatggatcatcagaacatccaagtccagtttctgttctcaatgcagaaatctaccgagagatcgaaccatctcctgtgaaaatccaagctagtgaaggcagtgttaatggctctattaactcgggtgttgaacattgcgaggaggaccagtggaatccagcttatagcttctcaaagacaacaacaagcttttcgccagagatgaaccgaaagaagcttcagaatgttgagcatttggttcaaaagctaaaaagactaaactctagccatgacgaaaccagtcaagattacattgcatctttatgcgagaacagtgatcctgacaccgatcacagatacatttccgagattcttttagcctcgggtcttctcctcagagatcttggctcaggattaacaacttttcaactgcacccttcaggccacccaattaatccggagctgttccttgtgattgagcaaactaaaggatgcagcagtagcagcaatgaaaagatcaaccgcaaacttgtgttcgatgctgttaatgaaatgctcgggaagaagctagcttttgttgagagctatgtagatccatggatgaagcaagctaaagcgagaaagaaggtcttaagtgcacaaaatctgttgaaggaactatgttcagagatagagatactacaaaagcaagccaagaagagatcagaaaacttgttgttgttggaggaagaagaagaagaagaagaagatttcttgaaatgtatattggatgaagatatggcaatccaatctgagaaatggacagactttgatgatgcaatccctggtttagtgcttgacatggagaggcttctcttcaaagatctggtgaaagagattgtgcacggtgagattgatcggctgcaaggaaactcaaggagacagaaaacggttttggctgacgagtagatattgatttatacaataagtcgtttttggattctctgtattctaaagcggtatatatataatacaagtcaatgttcatgacaacattctctttttcctatcccagaggccagaacattgtgttaattatt

SEQ ID NO: 34423 - protein, 978 aa, Arabidopsis thaliana
  misc_feature (1)..(978): Ceres Seq. ID no. 13606150
MAAKLLHTLADENSDLQKKIGCMNGIFQIFDRHHILTSRRKSLTLGNAHVNSINFERDSVDAICQQRSAFQCQDSNLVSSNGLSEKLTRLSTECSRVSFSSSCSSSSPLSSEVNREVQPEISADDRVIFPESPTSDPVMSQGTGARVGLDLRDVVRDSMYREARGLSDVCRQNRREDSPRPYGLKQSRPVDFNESCRALAKLRKTSHHYYNEVDMKDTSRYYVDSRGKSKSGKKLKELPRLSLDSRDHVDLKSGNKLSESFSRSSSMNKVSGSPKRPPSVVAKLMGLETLPGSPLSRDRFNMFDDNSDPFARSLRENSLNRSLRFSPSSPRSLGKDPAASSSSPRWRSSEFVMKPLSSLRYPIEPAPWKQTERNRFSQKQACRSVKSLSQSMEGKLKDLEVKHSGKDLRALKDILEAMQSKGLFDTRKQQQCSNLEAQRDYELADSATSKHDSIDLRNPVIPSNMRGPIVIMKPARLVEKSGIPSSSLIPIHSLSGLNKTCREEPVNVRRSSTSRKAVKDRSPGNQRAEPCISSDKKSSSRNVMSSQVYKESTSKNSGPASSKLQQMKPEHDKRSRPPASPSDSSKLRKQISRQPVESTTSPGGRRSRPRDQRSLQQNDGQLSQMSNKSRTKIEATLSIENGGKSPSVIEAAKAVVSNLIQNKSSPTFSEDGSSEHPSPVSVLNAEIYREIEPSPVKIQASEGSVNGSINSGVEHCEEDQWNPAYSFSKTTTSFSPEMNRKKLQNVEHLVQKLKRLNSSHDETSQDYIASLCENSDPDTDHRYISEILLASGLLLRDLGSGLTTFQLHPSGHPINPELFLVIEQTKGCSSSSNEKINRKLVFDAVNEMLGKKLAFVESYVDPWMKQAKARKKVLSAQNLLKELCSEIEILQKQAKKRSENLLLLEEEEEEEEDFLKCILDEDMAIQSEKWTDFDDAIPGLVLDMERLLFKDLVKEIVHGEIDRLQGNSRRQKTVLADE

SEQ ID NO: 34424 - protein, 956 aa, Arabidopsis thaliana
  misc_feature (1)..(956): Ceres Seq. ID no. 13606151
MNGIFQIFDRHHILTSRRKSLTLGNAHVNSINFERDSVDAICQQRSAFQCQDSNLVSSNGLSEKLTRLSTECSRVSFSSSCSSSSPLSSEVNREVQPEISADDRVIFPESPTSDPVMSQGTGARVGLDLRDVVRDSMYREARGLSDVCRQNRREDSPRPYGLKQSRPVDFNESCRALAKLRKTSHHYYNEVDMKDTSRYYVDSRGKSKSGKKLKELPRLSLDSRDHVDLKSGNKLSESFSRSSSMNKVSGSPKRPPSVVAKLMGLETLPGSPLSRDRFNMFDDNSDPFARSLRENSLNRSLRFSPSSPRSLGKDPAASSSSPRWRSSEFVMKPLSSLRYPIEPAPWKQTERNRFSQKQACRSVKSLSQSMEGKLKDLEVKHSGKDLRALKDILEAMQSKGLFDTRKQQQCSNLEAQRDYELADSATSKHDSIDLRNPVIPSNMRGPIVIMKPARLVEKSGIPSSSLIPIHSLSGLNKTCREEPVNVRRSSTSRKAVKDRSPGNQRAEPCISSDKKSSSRNVMSSQVYKESTSKNSGPASSKLQQMKPEHDKRSRPPASPSDSSKLRKQISRQPVESTTSPGGRRSRPRDQRSLQQNDGQLSQMSNKSRTKIEATLSIENGGKSPSVIEAAKAVVSNLIQNKSSPTFSEDGSSEHPSPVSVLNAEIYREIEPSPVKIQASEGSVNGSINSGVEHCEEDQWNPAYSFSKTTTSFSPEMNRKKLQNVEHLVQKLKRLNSSHDETSQDYIASLCENSDPDTDHRYISEILLASGLLLRDLGSGLTTFQLHPSGHPINPELFLVIEQTKGCSSSSNEKINRKLVFDAVNEMLGKKLAFVESYVDPWMKQAKARKKVLSAQNLLKELCSEIEILQKQAKKRSENLLLLEEEEEEEEDFLKCILDEDMAIQSEKWTDFDDAIPGLVLDMERLLFKDLVKEIVHGEIDRLQGNSRRQKTVLADE

SEQ ID NO: 34425 - protein, 840 aa, Arabidopsis thaliana
  misc_feature (1)..(840): Ceres Seq. ID no. 13606152
MSQGTGARVGLDLRDVVRDSMYREARGLSDVCRQNRREDSPRPYGLKQSRPVDFNESCRALAKLRKTSHHYYNEVDMKDTSRYYVDSRGKSKSGKKLKELPRLSLDSRDHVDLKSGNKLSESFSRSSSMNKVSGSPKRPPSVVAKLMGLETLPGSPLSRDRFNMFDDNSDPFARSLRENSLNRSLRFSPSSPRSLGKDPAASSSSPRWRSSEFVMKPLSSLRYPIEPAPWKQTERNRFSQKQACRSVKSLSQSMEGKLKDLEVKHSGKDLRALKDILEAMQSKGLFDTRKQQQCSNLEAQRDYELADSATSKHDSIDLRNPVIPSNMRGPIVIMKPARLVEKSGIPSSSLIPIHSLSGLNKTCREEPVNVRRSSTSRKAVKDRSPGNQRAEPCISSDKKSSSRNVMSSQVYKESTSKNSGPASSKLQQMKPEHDKRSRPPASPSDSSKLRKQISRQPVESTTSPGGRRSRPRDQRSLQQNDGQLSQMSNKSRTKIEATLSIENGGKSPSVIEAAKAVVSNLIQNKSSPTFSEDGSSEHPSPVSVLNAEIYREIEPSPVKIQASEGSVNGSINSGVEHCEEDQWNPAYSFSKTTTSFSPEMNRKKLQNVEHLVQKLKRLNSSHDETSQDYIASLCENSDPDTDHRYISEILLASGLLLRDLGSGLTTFQLHPSGHPINPELFLVIEQTKGCSSSSNEKINRKLVFDAVNEMLGKKLAFVESYVDPWMKQAKARKKVLSAQNLLKELCSEIEILQKQAKKRSENLLLLEEEEEEEEDFLKCILDEDMAIQSEKWTDFDDAIPGLVLDMERLLFKDLVKEIVHGEIDRLQGNSRRQKTVLADE

SEQ ID NO: 34426 - DNA, 636 bp, Arabidopsis thaliana
  misc_feature (1)..(636): Ceres Seq. ID no. 13606157
cagaataaaaatctatttcttgtgtttgtgttgtatttacttaaaaaaataaaggagatcagtttgggagaaagcagcaaagaagaaaaatggcagcaacatttgcaacaccatcgacggtgataggcctcggaggatcatccatcaccaccaaacccttctcttcatcctttttaaaaccaacattaagcgccaagaaccctttgagactcgccggtgcatcgggaggaagagtcacttgctttgagaggaactggttgaggagagatttgaacgtggtaggatttgggctgatcggatggctagctccgtcgagcattccagcgataaatgggaagagcctgacgggtctcttcttcgatagcatcggaactgagctcgctcacttcccgactcctccagctctcacttcacagttctggttgtggttggttacgtggcacttaggcctcttcctctgcctcactttcggacaaatcggattcaagggcaggactgaagattacttctaaggataactattcttgttttcgtttgtactatatgctctctcttggttatgtgtaatattatcaatcaaaacaaagctttctttgctatttgatgtttcattctatatctcgacaagtctttctt

SEQ ID NO: 34427 - protein, 140 aa, Arabidopsis thaliana
  misc_feature (1)..(140): Ceres Seq. ID no. 13606158
MAATFATPSTVIGLGGSSITTKPFSSSFLKPTLSAKNPLRLAGASGGRVTCFERNWLRRDLNVVGFGLIGWLAPSSIPAINGKSLTGLFFDSIGTELAHFPTPPALTSQFWLWLVTWHLGLFLCLTFGQIGFKGRTEDYF

SEQ ID NO: 34428 - DNA, 1444 bp, Arabidopsis thaliana
  misc_feature (1)..(1444): Ceres Seq. ID no. 13606170
aagaatcaaagaaagaagatggaatctgaaagactcgaatcacatcttctgaataagcaagaagaagaagcttcttccttcacttctggtcttcttctcagcacatccgtcgttgtcgctggatccttctgttatggctgcgcctccaaaatcatggaagaactgggactttccgttgcagattattcgtttttcacttcggtaatgacattaggaggaatgattaccgccgtgttcagcggtaaaatctctgctctcgttggtcgtcgacagacaatgtggatctcagatgtttgctgtatttttggttggctcgctgtagcgtttgcacatgatattataatgcttaatactggacgactcttcttggggtttggggttggtctcattagttatgtggttcctgtgtatatagcagaaattacacccaaaacatttcgtggaggattttcttattccaatcagcttctacaatgtcttgggatttcactcatgttcttcaccggaaactttttccattggcgaacattagctcttttaagtgcaatcccaagtgctttccaagtgatatgtttattttttattcctgaatctcctagatggctggcgatgtatggtcaagatcaagagcttgaagtttcgttgaaaaaactaaggggagaaaatagtgatattctaaaggaagctgctgaaatcagagaaacagtggaaatatccagaaaagagtctcaaagtggaataagagacttgttccatatcggaaacgcacattcgttaatcattggattgggtttaatgctcttgcaacaattttgtgggagtgcggcgataagtgcttatgctgctcgaattttcgacaaagccggttttccaagcgacataggaacaaccatcctcgcagtgattctgataccgcaatctatagttgtcatgttaaccgttgaccgatggggacgccgaccacttcttatgatttcttctatcggaatgtgcatatgctcattttttattggcctttcatactaccttcagaagaatggtgaatttcagaagttatgttccgttatgttaatcgtcggtttagtgggttatgtctcatcctttggcattggcctaggtggattaccatgggttataatgtctgagatatttccggtgaatgtgaaaatcaccgccggtagccttgtaacgatgtcaaattggttttttaattggattatcatctatagttttaatttcatgatacagtggagcgcttccggaacatatttcatattttctggagtttctctggtgacgatcgtattcatatggacattggtgcctgagacgaaaggccgaacactcgaagagattcaaacatcattagtccgactttcgtaaaatctaagtatggattatacgtaatgttaagtctcttgaatagtctttttaaccgtatatt

SEQ ID NO: 34429 - protein, 460 aa, Arabidopsis thaliana
  misc_feature (1)..(460): Ceres Seq. ID no. 13606171
KNQRKKMESERLESHLLNKQEEEASSFTSGLLLSTSVVVAGSFCYGCASKIMEELGLSVADYSFFTSVMTLGGMITAVFSGKISALVGRRQTMWISDVCCIFGWLAVAFAHDIIMLNTGRLFLGFGVGLISYVVPVYIAEITPKTFRGGFSYSNQLLQCLGISLMFFTGNFFHWRTLALLSAIPSAFQVICLFFIPESPRWLAMYGQDQELEVSLKKLRGENSDILKEAAEIRETVEISRKESQSGIRDLFHIGNAHSLIIGLGLMLLQQFCGSAAISAYAARIFDKAGFPSDIGTTILAVILIPQSIVVMLTVDRWGRRPLLMISSIGMCICSFFIGLSYYLQKNGEFQKLCSVMLIVGLVGYVSSFGIGLGGLPWVIMSEIFPVNVKITAGSLVTMSNWFFNWIIIYSFNFMIQWSASGTYFIFSGVSLVTIVFIWTLVPETKGRTLEEIQTSLVRLS

SEQ ID NO: 34430 - protein, 454 aa, Arabidopsis thaliana
  misc_feature (1)..(454): Ceres Seq. ID no. 13606172
MESERLESHLLNKQEEEASSFTSGLLLSTSVVVAGSFCYGCASKIMEELGLSVADYSFFTSVMTLGGMITAVFSGKISALVGRRQTMWISDVCCIFGWLAVAFAHDIIMLNTGRLFLGFGVGLISYVVPVYIAEITPKTFRGGFSYSNQLLQCLGISLMFFTGNFFHWRTLALLSAIPSAFQVICLFFIPESPRWLAMYGQDQELEVSLKKLRGENSDILKEAAEIRETVEISRKESQSGIRDLFHIGNAHSLIIGLGLMLLQQFCGSAAISAYAARIFDKAGFPSDIGTTILAVILIPQSIVVMLTVDRWGRRPLLMISSIGMCICSFFIGLSYYLQKNGEFQKLCSVMLIVGLVGYVSSFGIGLGGLPWVIMSEIFPVNVKITAGSLVTMSNWFFNWIIIYSFNFMIQWSASGTYFIFSGVSLVTIVFIWTLVPETKGRTLEEIQTSLVRLS

SEQ ID NO: 34431 - protein, 409 aa, Arabidopsis thaliana
  misc_feature (1)..(409): Ceres Seq. ID no. 13606173
MEELGLSVADYSFFTSVMTLGGMITAVFSGKISALVGRRQTMWISDVCCIFGWLAVAFAHDIIMLNTGRLFLGFGVGLISYVVPVYIAEITPKTFRGGFSYSNQLLQCLGISLMFFTGNFFHWRTLALLSAIPSAFQVICLFFIPESPRWLAMYGQDQELEVSLKKLRGENSDILKEAAEIRETVEISRKESQSGIRDLFHIGNAHSLIIGLGLMLLQQFCGSAAISAYAARIFDKAGFPSDIGTTILAVILIPQSIVVMLTVDRWGRRPLLMISSIGMCICSFFIGLSYYLQKNGEFQKLCSVMLIVGLVGYVSSFGIGLGGLPWVIMSEIFPVNVKITAGSLVTMSNWFFNWIIIYSFNFMIQWSASGTYFIFSGVSLVTIVFIWTLVPETKGRTLEEIQTSLVRLS

SEQ ID NO: 34432 - DNA, 1817 bp, Arabidopsis thaliana
  misc_feature (1)..(1817): Ceres Seq. ID no. 13606174
aaaagattggggaagctgacctctgcctttcctcctccattaatcaaggaatataaatcagctttaaactcagtcctcttatggaagacaaaaaagcaaatatttattcgtaaatataacttcagaaccctttcaacaaaactctctctgttctttctccgtggagaagttaaagatgacgatgtcggagaactcaagaaacttggaagctggtttgctactgaggaagaaccaaaacgacatcaacgaatgtcgtatcactgctgttgtacttttcagtactttcgtttctgtttgtggctctttctgcttcggttgtgcggcaggttattcatcagttgctcaaacagggatcataaatgatttaggtctctctgttgcacaatactccatgtttggttcaatcatgacttttggaggaatgattggtgccatcttcagcgggaaagttgcagatctcatgggtcgaaaagggactatgtggtttgctcaaattttctgcatcttcggttgggttgcagtagcattagcaaaagactccatgtggcttgatattggaagactatccacaggatttgcagttggtttattaagctatgtgataccagtttacattgcagaaataacaccaaaacatgttcgaggagcgtttgtatttgctaatcagctgatgcagagttgtggattgtctttattctacgtcattggaaattttgttcattggcgtaacttggccttaatcggtctcattccatgtgcgttgcaagttgtgactttgttctttattccagagtcccctagactactgggaaaatggggacatgaaaaagaatgtagagcttcattgcaaagtcttcgcggagatgatgcagatatctctgaagaagccaacactatcaaagaaaccatgatcttgtttgatgaaggaccaaaatcgcgggttatggatttgtttcagagaagatatgctccatctgttgttattggtgtgggactaatgcttctacaacaactctctggaagctcaggacttatgtactatgtcggtagcgtatttgataaaggagggtttccaagcagcattggctcaatgattcttgcagtgatcatgataccaaaagctctattgggtctgattttggttgagaaaatgggacgaagaccacttctattggcctctaccggtggaatgtgctttttcagcttgctcctcagtttttccttctgctttcggtcatatggcatgcttgatgagctcactccgattttcacatgtatcggtgtagtgggtttcatctcttcatttgccgtaggcatgggaggcttaccatggatcatcatgtctgagatattcccaatgaatgttaaagtttctgctgggactctggttaccttagccaactggtcctttggttggattgttgctttcgcctacaacttcatgctagagtggaacgcatcaggaacgttcttgatcttctttactatatgtggtgcgggtatagtctttatttatgcgatggtacccgaaactaaaggaagaacattggaagatatacaagcttctcttacagattttctacaatgagatcaagtttgacttgtttaaagttattcattttttcttagattacaattggggggaggtttatagttttttgttgtaattgttacctcatttgatgtgcaattgagaaagagatcacttgaacataaggtttagatatctctctgtctcagtaaattagcccaatgtatgtatagtatagtcccagttttacacccaaaaaaaagaaatataaaattgaactttaagg

SEQ ID NO: 34433 - protein, 470 aa, Arabidopsis thaliana
  misc_feature (1)..(470): Ceres Seq. ID no. 13606175
MTMSENSRNLEAGLLLRKNQNDINECRITAVVLFSTFVSVCGSFCFGCAAGYSSVAQTGIINDLGLSVAQYSMFGSIMTFGGMIGAIFSGKVADLMGRKGTMWFAQIFCIFGWVAVALAKDSMWLDIGRLSTGFAVGLLSYVIPVYIAEITPKHVRGAFVFANQLMQSCGLSLFYVIGNFVHWRNLALIGLIPCALQVVTLFFIPESPRLLGKWGHEKECRASLQSLRGDDADISEEANTIKETMILFDEGPKSRVMDLFQRRYAPSVVIGVGLMLLQQLSGSSGLMYYVGSVFDKGGFPSSIGSMILAVIMIPKALLGLILVEKMGRRPLLLASTGGMCFFSLLLSFSFCFRSYGMLDELTPIFTCIGVVGFISSFAVGMGGLPWIIMSEIFPMNVKVSAGTLVTLANWSFGWIVAFAYNFMLEWNASGTFLIFFTICGAGIVFIYAMVPETKGRTLEDIQASLTDFLQ

SEQ ID NO: 34434 - protein, 468 aa, Arabidopsis thaliana
  misc_feature (1)..(468): Ceres Seq. ID no. 13606176
MSENSRNLEAGLLLRKNQNDINECRITAVVLFSTFVSVCGSFCFGCAAGYSSVAQTGIINDLGLSVAQYSMFGSIMTFGGMIGAIFSGKVADLMGRKGTMWFAQIFCIFGWVAVALAKDSMWLDIGRLSTGFAVGLLSYVIPVYIAEITPKHVRGAFVFANQLMQSCGLSLFYVIGNFVHWRNLALIGLIPCALQVVTLFFIPESPRLLGKWGHEKECRASLQSLRGDDADISEEANTIKETMILFDEGPKSRVMDLFQRRYAPSVVIGVGLMLLQQLSGSSGLMYYVGSVFDKGGFPSSIGSMILAVIMIPKALLGLILVEKMGRRPLLLASTGGMCFFSLLLSFSFCFRSYGMLDELTPIFTCIGVVGFISSFAVGMGGLPWIIMSEIFPMNVKVSAGTLVTLANWSFGWIVAFAYNFMLEWNASGTFLIFFTICGAGIVFIYAMVPETKGRTLEDIQASLTDFLQ

SEQ ID NO: 34435 - protein, 398 aa, Arabidopsis thaliana
  misc_feature (1)..(398): Ceres Seq. ID no. 13606177
MFGSIMTFGGMIGAIFSGKVADLMGRKGTMWFAQIFCIFGWVAVALAKDSMWLDIGRLSTGFAVGLLSYVIPVYIAEITPKHVRGAFVFANQLMQSCGLSLFYVIGNFVHWRNLALIGLIPCALQVVTLFFIPESPRLLGKWGHEKECRASLQSLRGDDADISEEANTIKETMILFDEGPKSRVMDLFQRRYAPSVVIGVGLMLLQQLSGSSGLMYYVGSVFDKGGFPSSIGSMILAVIMIPKALLGLILVEKMGRRPLLLASTGGMCFFSLLLSFSFCFRSYGMLDELTPIFTCIGVVGFISSFAVGMGGLPWIIMSEIFPMNVKVSAGTLVTLANWSFGWIVAFAYNFMLEWNASGTFLIFFTICGAGIVFIYAMVPETKGRTLEDIQASLTDFLQ

SEQ ID NO: 34436 - DNA, 1595 bp, Arabidopsis thaliana
  misc_feature (1)..(1595): Ceres Seq. ID no. 13606178
atggaaatcgagcgtaagctgctgcgtcttctccacggccacaatactcgaacccgtttacccgaaatccacgcccatcttctgcgtcacttccttcatggttccaatctccttctcgcccacttcatctctatctgcggatccctcagcaactctgattacgccaaccgcgtcttctctcatatccaaaaccctaacgttctggtcttcaacgccatgatcaaatgctattcgcttgtcggtccgcctctagaatctttatctttcttctcttccatgaaaagccggggaatttgggctgacgagtatacttacgcgcctttgctcaaatcctgttcgtctctttctgatttgcgatttgggaaatgcgttcatggtgagcttataagaactgggttccaccgtcttgggaaaattaggattggggtggtggagctttatacttccggtgggagaatgggtgatgcacagaaagtgttcgacgaaatgtctgagagaaacgttgtcgtctggaatcttatgattcgcgggttctgtgactccggggacgttgaaagaggtcttcatttgttcaaacagatgagcgaaagaagcattgtgtcgtggaattcgatgatatctagcttgtctaaatgtggtagagatcgtgaggctttggagcttttctgcgaaatgattgatcaaggttttgaccctgatgaggcgactgtggttacagtcttgccaatttctgcatctctaggagtgttggataccggaaaatggattcattctaccgcagaatccagtggtttgtttaaagatttcatcaccgtgggaaacgctttggtagatttctactgcaaaagcggcgacttggaggcagcaacggctatatttagaaaaatgcagcgtagaaacgttgtttcatggaacacattgatatcgggatcagccgtaaacggaaagggagaatttgggatagacttgtttgatgctatgatagaggaagggaaagtagctccaaatgaagcgacatttttgggggttttggcatgttgctcatacacaggtcaggtggagagaggagaggaattgtttggtttgatgatggaaagattcaaacttgaggcgagaaccgagcattacggtgccatggtagatctaatgagtagaagtgggagaatcacagaggcgtttaagtttctaaaaaatatgcccgtaaacgcaaatgcggcaatgtgggggtcgctgctcagtgcttgtcgtagccacggagatgtaaagctagcagaagttgcagcaatggagttagtgaagattgagccagggaattcggggaattatgtgttgttatctaatttgtatgcagaggaagggagatggcaagatgtggagaaggtacgaacgttgatgaaaaagaaccgccttagaaagtctactggccaaagcaccatttgcgatgtttcagtctgagaagtagctggtttttgtcaatagaggccagacttattgctaaatacggtaatcaagttcatttgtaagcacatttgtatttttctggctcggtgaaaatgcggccaccaggtttgattagtttctaatgaattgattag

SEQ ID NO: 34437 - protein, 484 aa, Arabidopsis thaliana
  misc_feature (1)..(484): Ceres Seq. ID no. 13606179
MEIERKLLRLLHGHNTRTRLPEIHAHLLRHFLHGSNLLLAHFISICGSLSNSDYANRVFSHIQNPNVLVFNAMIKCYSLVGPPLESLSFFSSMKSRGIWADEYTYAPLLKSCSSLSDLRFGKCVHGELIRTGFHRLGKIRIGVVELYTSGGRMGDAQKVFDEMSERNVVVWNLMIRGFCDSGDVERGLHLFKQMSERSIVSWNSMISSLSKCGRDREALELFCEMIDQGFDPDEATVVTVLPISASLGVLDTGKWIHSTAESSGLFKDFITVGNALVDFYCKSGDLEAATAIFRKMQRRNVVSWNTLISGSAVNGKGEFGIDLFDAMIEEGKVAPNEATFLGVLACCSYTGQVERGEELFGLMMERFKLEARTEHYGAMVDLMSRSGRITEAFKFLKNMPVNANAAMWGSLLSACRSHGDVKLAEVAAMELVKIEPGNSGNYVLLSNLYAEEGRWQDVEKVRTLMKKNRLRKSTGQSTICDVSV

SEQ ID NO: 34438 - protein, 412 aa, Arabidopsis thaliana
  misc_feature (1)..(412): Ceres Seq. ID no. 13606180
MIKCYSLVGPPLESLSFFSSMKSRGIWADEYTYAPLLKSCSSLSDLRFGKCVHGELIRTGFHRLGKIRIGVVELYTSGGRMGDAQKVFDEMSERNVVVWNLMIRGFCDSGDVERGLHLFKQMSERSIVSWNSMISSLSKCGRDREALELFCEMIDQGFDPDEATVVTVLPISASLGVLDTGKWIHSTAESSGLFKDFITVGNALVDFYCKSGDLEAATAIFRKMQRRNVVSWNTLISGSAVNGKGEFGIDLFDAMIEEGKVAPNEATFLGVLACCSYTGQVERGEELFGLMMERFKLEARTEHYGAMVDLMSRSGRITEAFKFLKNMPVNANAAMWGSLLSACRSHGDVKLAEVAAMELVKIEPGNSGNYVLLSNLYAEEGRWQDVEKVRTLMKKNRLRKSTGQSTICDVSV

SEQ ID NO: 34439 - protein, 392 aa, Arabidopsis thaliana
  misc_feature (1)..(392): Ceres Seq. ID no. 13606181
MKSRGIWADEYTYAPLLKSCSSLSDLRFGKCVHGELIRTGFHRLGKIRIGVVELYTSGGRMGDAQKVFDEMSERNVVVWNLMIRGFCDSGDVERGLHLFKQMSERSIVSWNSMISSLSKCGRDREALELFCEMIDQGFDPDEATVVTVLPISASLGVLDTGKWIHSTAESSGLFKDFITVGNALVDFYCKSGDLEAATAIFRKMQRRNVVSWNTLISGSAVNGKGEFGIDLFDAMIEEGKVAPNEATFLGVLACCSYTGQVERGEELFGLMMERFKLEARTEHYGAMVDLMSRSGRITEAFKFLKNMPVNANAAMWGSLLSACRSHGDVKLAEVAAMELVKIEPGNSGNYVLLSNLYAEEGRWQDVEKVRTLMKKNRLRKSTGQSTICDVSV

SEQ ID NO: 34440 - DNA, 1564 bp, Arabidopsis thaliana
  misc_feature (1)..(1564): Ceres Seq. ID no. 13606187
ataaatgtgtgtatatatacatctttggctataaatataaggtcgaaccaaaataaaatatagatttggggaaactaataaatgatatagagaatccacctctctcccttatttttttttcttggtttcttgacctattattattgattagtaatagtgagagaggcatattttggagatacacataaacacataaattggaagaataaaataaaagagagtgagagatggctaaatcagatatgttgccgttcttggcgatggtgttggtgcaaatcggctacgcaggcatgaacattacgtcgaagatggctatggaggccggtatgaagccactcatcctggtcgcttatcgtcagatatttgccactatcgccacttttccggtcgcattttttctcgaacggaagacaagaccgaagatcacacttaggattcttgtccaagtcttcttctgctccattactggtgcgactggaaaccaagtgctatatttcgtaggacttcagaattcatctccgaccattgcttgtgccttaactaatctcttaccagcggtcactttcctcctcgccgcaatattcagacaagaaaccgtggggatcaagaaggcatcaggacaagccaaagtgatagggacgctagtatgtgtgatcggagccatggttctctccttctaccatggtcacaccatcggcattggagaatccaagatccattgggcctacgctgaaaacatcacgaaacatggttccagttctggccattctaatttcttcttgggaccttttcttattatggctgctgccgtttcttgggccgcttggttcattatccagacgaagatgagtgaaacatttgcagcaccgtacacgagcacactactaatgtgtttgatgggaagtatccaatgtggagccattgctttgatctccgatcatacaatctctgattggtctctcagctctcctctccgcttcatatccgccctttatgccggagtggtggcgtctgcgttagctttctgcctaatgtcatgggctatgcagaggaaaggtcctctgtacgtctctgttttcagccctttacttctcgtagttgtcgccattttcagctgggctcttcttgaagagaaactctacaccggcacgtttatgggatcagcacttgtggttattggtctctatggcgtattgtgggggaaagacagagaggtgagtgagaaggaagaagaaagggagaaggtgaaacaacaaaaccataaagtcaagagtgaaagtaatgaagatattgaatcgagattaccggtagcaagtagtggaaatggttccacaaggtctacatcgccttaaaatggtgattgcttcttcatcatatataagtatgagctatggaagaaccttttgggatttcttgttatctaagttactgcaactaaattggattttcggagtgtttaattttgtatcccattttgaggctaatgatggagtgttgatttgtgtgttcatcctatggacaacaaatatcacctgtttgatctctatatatattcagtattctt

SEQ ID NO: 34441 - protein, 374 aa, Arabidopsis thaliana
  misc_feature (1)..(374): Ceres Seq. ID no. 13606188
MAKSDMLPFLAMVLVQIGYAGMNITSKMAMEAGMKPLILVAYRQIFATIATFPVAFFLERKTRPKITLRILVQVFFCSITGATGNQVLYFVGLQNSSPTIACALTNLLPAVTFLLAAIFRQETVGIKKASGQAKVIGTLVCVIGAMVLSFYHGHTIGIGESKIHWAYAENITKHGSSSGHSNFFLGPFLIMAAAVSWAAWFIIQTKMSETFAAPYTSTLLMCLMGSIQCGAIALISDHTISDWSLSSPLRFISALYAGVVASALAFCLMSWAMQRKGPLYVSVFSPLLLVVVAIFSWALLEEKLYTGTFMGSALVVIGLYGVLWGKDREVSEKEEEREKVKQQNHKVKSESNEDIESRLPVASSGNGSTRSTSP

SEQ ID NO: 34442 - protein, 369 aa, Arabidopsis thaliana
  misc_feature (1)..(369): Ceres Seq. ID no. 13606189
MLPFLAMVLVQIGYAGMNITSKMAMEAGMKPLILVAYRQIFATIATFPVAFFLERKTRPKITLRILVQVFFCSITGATGNQVLYFVGLQNSSPTIACALTNLLPAVTFLLAAIFRQETVGIKKASGQAKVIGTLVCVIGAMVLSFYHGHTIGIGESKIHWAYAENITKHGSSSGHSNFFLGPFLIMAAAVSWAAWFIIQTKMSETFAAPYTSTLLMCLMGSIQCGAIALISDHTISDWSLSSPLRFISALYAGVVASALAFCLMSWAMQRKGPLYVSVFSPLLLVVVAIFSWALLEEKLYTGTFMGSALVVIGLYGVLWGKDREVSEKEEEREKVKQQNHKVKSESNEDIESRLPVASSGNGSTRSTSP

SEQ ID NO: 34443 - protein, 363 aa, Arabidopsis thaliana
  misc_feature (1)..(363): Ceres Seq. ID no. 13606190
MVLVQIGYAGMNITSKMAMEAGMKPLILVAYRQIFATIATFPVAFFLERKTRPKITLRILVQVFFCSITGATGNQVLYFVGLQNSSPTIACALTNLLPAVTFLLAAIFRQETVGIKKASGQAKVIGTLVCVIGAMVLSFYHGHTIGIGESKIHWAYAENITKHGSSSGHSNFFLGPFLIMAAAVSWAAWFIIQTKMSETFAAPYTSTLLMCLMGSIQCGAIALISDHTISDWSLSSPLRFISALYAGVVASALAFCLMSWAMQRKGPLYVSVFSPLLLVVVAIFSWALLEEKLYTGTFMGSALVVIGLYGVLWGKDREVSEKEEEREKVKQQNHKVKSESNEDIESRLPVASSGNGSTRSTSP

SEQ ID NO: 34444 - DNA, 1129 bp, Arabidopsis thaliana
  misc_feature (1)..(1129): Ceres Seq. ID no. 13606191
aaaacaattattttcagacacagagagactcagacaggagatatgaactgcggaggaaaggtggtctgcgttaccggagcttccggctacatagcgtcttggattgtcaagcttttgctcctccgtggctacaccgtcaatgccactgttcgagatccaaaggacaagaagaaaacagaacatcttcttgcactagacggtgcaaaagaaagactcaaattgttcaaagcagatcttttggaagaatcttcttttgatcaagctatcgatggttgtgatgctgtcttccacactgcttctccagttctattcactgtcacagatcctcagactgagctgattgatccagccttaaagggtactattaacgtccttaatacatgcaaacaagtttcttctgtcaagagggtcattctgacatcttccacggctgcggttctctctcgtcagcctcctattgggccaaacgacctggtggacgagactttcttctccgatccaagtctatgcagggagacaaagaattggtattcactctccaagattttggccgagaatgcagcgtggcaatttgccaaagacaatggaatcgacatggttgtgttgaatcctggatttatttgcggaccactcttgcaaccaactcttaacatgtcggtagagctaattgtggatttcataaatggtaagaaccctttcaataaaagatactacaggttctcggacgtaagagatgtcgccttggttcatatcaaagcgttggagactccttcagccaatggcagatacatcatcgatggtccaaatatgagtgtaaacgacattatagacattcttcggaagctgttcccagatttgtctattgctgatacgaatgaagaaagtgagatgaatgagatgatatgccaagtgtgtgtggagaaagtgaaaaatttgggagtagagttcactcctatgaaatcaagccttagagacactattgttagcctcaaggagaaatgtcttttatgattctgttcgtatatttgtaactattatgtgtatttttattttgttagtattactaattcaagtggtttaagttgttgagactctttaaaatctaagcattttataaacaataatatat

SEQ ID NO: 34445 - protein, 336 aa, Arabidopsis thaliana
  misc_feature (1)..(336): Ceres Seq. ID no. 13606192
KTIIFRHRETQTGDMNCGGKVVCVTGASGYIASWIVKLLLLRGYTVNATVRDPKDKKKTEHLLALDGAKERLKLFKADLLEESSFDQAIDGCDAVFHTASPVLFTVTDPQTELIDPALKGTINVLNTCKQVSSVKRVILTSSTAAVLSRQPPIGPNDLVDETFFSDPSLCRETKNWYSLSKILAENAAWQFAKDNGIDMVVLNPGFICGPLLQPTLNMSVELIVDFINGKNPFNKRYYRFSDVRDVALVHIKALETPSANGRYIIDGPNMSVNDIIDILRKLFPDLSIADTNEESEMNEMICQVCVEKVKNLGVEFTPMKSSLRDTIVSLKEKCLL

SEQ ID NO: 34446 - protein, 322 aa, Arabidopsis thaliana
  misc_feature (1)..(322): Ceres Seq. ID no. 13606193
MNCGGKVVCVTGASGYIASWIVKLLLLRGYTVNATVRDPKDKKKTEHLLALDGAKERLKLFKADLLEESSFDQAIDGCDAVFHTASPVLFTVTDPQTELIDPALKGTINVLNTCKQVSSVKRVILTSSTAAVLSRQPPIGPNDLVDETFFSDPSLCRETKNWYSLSKILAENAAWQFAKDNGIDMVVLNPGFICGPLLQPTLNMSVELIVDFINGKNPFNKRYYRFSDVRDVALVHIKALETPSANGRYIIDGPNMSVNDIIDILRKLFPDLSIADTNEESEMNEMICQVCVEKVKNLGVEFTPMKSSLRDTIVSLKEKCLL

SEQ ID NO: 34447 - DNA, 1227 bp, Arabidopsis thaliana
  misc_feature (1)..(1227): Ceres Seq. ID no. 13606202
cgttctattttcttctcctttttctatctttagcaatgaacatatcagtaaacggacagtcacaagtacctcctggctttaggtttcacccaaccgaggaagagctcttgaagtattacctccgcaagaaaatctctaacatcaagatcgatctcgatgttattcctgacattgatctcaacaagctcgagccttgggatattcaagagatgtgtaagattggaacgacgccgcaaaacgattggtacttttatagccataaggacaagaagtatcccaccgggactagaaccaacagagccaccacggtcggattttggaaagcgacgggacgtgacaagaccatatataccaatggtgatagaatcgggatgcgaaagacgcttgtcttctacaaaggtcgagcccctcatggtcagaaatccgattggatcatgcacgaatatagactcgacgagagtgtattaatctcctcgtgtggcgatcatgacgtcaacgtagaaacgtgtgatgtcataggaagtgacgaaggatgggtggtgtgtcgtgttttcaagaaaaataacctttgcaaaaacatgattagtagtagcccggcgagttcggtgaaaacgccgtcgttcaatgaggagactatcgagcaacttctcgaagttatggggcaatcttgtaaaggagagatagttttagaccctttcttaaaactccctaacctcgaatgccataacaacaccaccatcacgagttatcagtggttaatcgacgaccaagtcaacaactgccacgtcagcaaagttatggatcccagcttcatcactagctgggccgctttggatcggctcgttgcctcacagttaaatgggcccaactcgtattcaataccagccgttaatgagacttcacaatcaccgtatcatggactgaaccggtccggttgtaataccggtttaacaccagattactatataccggagattgatttatggaacgaggcagatttcgcgagaacgacatgccacttgttgaacggtagtggataacggaaatggaagagaggaagtgactaagtgagtgacataccaaaacattgtgtagaaagatataataatcatcataccatatatatagttgttgaaacttttacggtataaatggtcagattgtgataattacagtacgtagttatgtgatatcattacagaaaataaaagttctctatatctgtgt

SEQ ID NO: 34448 - protein, 345 aa, Arabidopsis thaliana
  misc_feature (1)..(345): Ceres Seq. ID no. 13606203
FYFLLLFLSLAMNISVNGQSQVPPGFRFHPTEEELLKYYLRKKISNIKIDLDVIPDIDLNKLEPWDIQEMCKIGTTPQNDWYFYSHKDKKYPTGTRTNRATTVGFWKATGRDKTIYTNGDRIGMRKTLVFYKGRAPHGQKSDWIMHEYRLDESVLISSCGDHDVNVETCDVIGSDEGWVVCRVFKKNNLCKNMISSSPASSVKTPSFNEETIEQLLEVMGQSCKGEIVLDPFLKLPNLECHNNTTITSYQWLIDDQVNNCHVSKVMDPSFITSWAALDRLVASQLNGPNSYSIPAVNETSQSPYHGLNRSGCNTGLTPDYYIPEIDLWNEADFARTTCHLLNGSG

SEQ ID NO: 34449 - protein, 334 aa, Arabidopsis thaliana
  misc_feature (1)..(334): Ceres Seq. ID no. 13606204
MNISVNGQSQVPPGFRFHPTEEELLKYYLRKKISNIKIDLDVIPDIDLNKLEPWDIQEMCKIGTTPQNDWYFYSHKDKKYPTGTRTNRATTVGFWKATGRDKTIYTNGDRIGMRKTLVFYKGRAPHGQKSDWIMHEYRLDESVLISSCGDHDVNVETCDVIGSDEGWVVCRVFKKNNLCKNMISSSPASSVKTPSFNEETIEQLLEVMGQSCKGEIVLDPFLKLPNLECHNNTTITSYQWLIDDQVNNCHVSKVMDPSFITSWAALDRLVASQLNGPNSYSIPAVNETSQSPYHGLNRSGCNTGLTPDYYIPEIDLWNEADFARTTCHLLNGSG

SEQ ID NO: 34450 - protein, 276 aa, Arabidopsis thaliana
  misc_feature (1)..(276): Ceres Seq. ID no. 13606205
MCKIGTTPQNDWYFYSHKDKKYPTGTRTNRATTVGFWKATGRDKTIYTNGDRIGMRKTLVFYKGRAPHGQKSDWIMHEYRLDESVLISSCGDHDVNVETCDVIGSDEGWVVCRVFKKNNLCKNMISSSPASSVKTPSFNEETIEQLLEVMGQSCKGEIVLDPFLKLPNLECHNNTTITSYQWLIDDQVNNCHVSKVMDPSFITSWAALDRLVASQLNGPNSYSIPAVNETSQSPYHGLNRSGCNTGLTPDYYIPEIDLWNEADFARTTCHLLNGSG

SEQ ID NO: 34451 - DNA, 1501 bp, Arabidopsis thaliana
  misc_feature (1)..(1501): Ceres Seq. ID no. 13606241
aaaaaaaaaaaaactttactcatcgagactcgtttagtgattcgaaatttcccttctcggctcaaatcttcgatctgggctttcgtgtctttttgcgttttgattggtaataaaaagaagctttttaaaaactttttccatggctggaagtgaagaagttaatcttattgagagcaagacagtggttcctctcaatacatgggttctaatatccaactttaagctagcttacaatctcctgcgtcgccctgacggaacttttaaccgtcatctcgcagagtttctagaccggaaagtccctgcaaatgccaaccctgttaatggggtcttctcttttgatgtgatcatcgatcgccaaactaatttgcttagcagagtttacagaccagctgatgctggcacttcaccaagtattactgatctacagaatcctgttgatggtgaaatagtgcctgttattgtcttctttcatggtggaagctttgcacattcttctgcaaacagtgctatttatgatactctttgtcgtaggcttgttggtttgtgtggtgctgttgttgtctctgtgaattatcgtcgtgcaccagagaatcgatacccttgtgcttatgatgatggatgggctgttttgaaatgggtcaactcgagttcttggcttagaagcaagaaagactcaaaggttcgtattttcttggcgggtgatagctctgggggtaacattgtgcataatgtcgcggtaagagcggttgagtcaaggatcgatgttttggggaacattttgcttaaccctatgtttggagggaccgaaagaacggaatctgagaaacgtttggatgggaagtactttgttacggttagagaccgagattggtattggagagcgtttcttcctgagggtgaagacagagagcatccagcgtgtagcccgtttggcccgagaagcaagagtctagaagggttgagtttccccaagagtcttgtcgttgtagcgggtttagatttgattcaagattggcaattgaagtacgcggaagggctcaagaaagcgggtcaagaggtgaagcttctttacttggagcaagccactattggcttctacttattgcctaacaacaatcacttccataccgttatggatgagatagctgcatttgtaaacgcagaatgccaatgagaacactcttatctctcactgtaatctcttcactaacaaacgggtgatatccaccatggaaggtgaaagcccgagattctcgttttagaagctctttgtagtgagtcaaaagaacggcgtttaactactaccgcggtggtggtggctgcgtccgcgtttgtgaaccgtccaaagctggattctgaaagcaaagcaggaagaagaacagtgtagtcggtaattatgtttggctttctagcgttagcttttgactttaactagagctgagttttttcagcttgtggttaatagtaactttggttatgttactattatgatattttcggt

SEQ ID NO: 34452 - protein, 344 aa, Arabidopsis thaliana
  misc_feature (1)..(344): Ceres Seq. ID no. 13606242
MAGSEEVNLIESKTVVPLNTWVLISNFKLAYNLLRRPDGTFNRHLAEFLDRKVPANANPVNGVFSFDVIIDRQTNLLSRVYRPADAGTSPSITDLQNPVDGEIVPVIVFFHGGSFAHSSANSAIYDTLCRRLVGLCGAVVVSVNYRRAPENRYPCAYDDGWAVLKWVNSSSWLRSKKDSKVRIFLAGDSSGGNIVHNVAVRAVESRIDVLGNILLNPMFGGTERTESEKRLDGKYFVTVRDRDWYWRAFLPEGEDREHPACSPFGPRSKSLEGLSFPKSLVVVAGLDLIQDWQLKYAEGLKKAGQEVKLLYLEQATIGFYLLPNNNHFHTVMDEIAAFVNAECQ

SEQ ID NO: 34453 - DNA, 2313 bp, Arabidopsis thaliana
  misc_feature (1)..(2313): Ceres Seq. ID no. 13606243
atggaatttgcttcgccggaacaacgtcgtctcgaaaccattcgatctcacatcgatacttctccgaccaacgatcaatcatcatctctattcctcaacgccaccgcttcttctgcttcacctttctttaaagaggatagctacagtgttgtgcttccagaaaagcttgatactggaaaatggaatgtctacagatctaaaagatcgcctacgaaactcgttagtaggttcccggatcatcctgaaatcgggactttacatgacaattttgtacatgctgttgaaacatatgctgaaaacaagtatcttggtacacgagttcggtccgatggaaccattggagagtattcatggatgacatatggagaagcagcgtctgagcgacaagccattggttcaggactcttgtttcatggagttaaccaaggagattgcgttggactctattttattaacagaccagagtggttggttgtggatcatgcttgtgcagcatattcatttgtctctgttcctttatatgatacacttggtccagacgctgttaagtttgtggtgaatcatgctaatctgcaagctatattttgtgtaccacaaaccttgaatattttgctaagcttcctagcggaaatcccatccattcgtctcattgtggtggtgggaggggctgatgagcatttgccatcacttcctcgaggaactggagtcacaattgtatcataccaaaagctattgagtcagggtcgaagtagcttacatccattttcgcctccaaagccagaagacattgcaaccatatgctacacaagtggaaccacaggaacaccaaagggtgttgtgttgactcatggaaacttgatcgcgaatgtcgctggttccagtgtggaagcagaattctttccttcagatgtttacatatcatatcttcctttggcgcacatatatgaacgtgcaaatcagattatgggggtgtatggtggtgttgctgtcggtttctatcagggggatgtcttcaagctgatggatgattttgctgtgttaagaccaacaatattctgtagtgtccctcgcttatataatcgaatatatgatggcattacaagtgccgtaaaatcatctggggttgtgaaaaaaaggcttttcgaaattgcctataactcaaagaagcaagcgatcattaatgggcggactccttctgcattttgggacaagctggtgttcaacaaaataaaagaaaagcttggtggacgggttcggtttatggggtctggtgcttctcctttgtcacctgatgtcatggatttcttgagaatatgctttggatgttcggtgcgtgaagggtatggtatgaccgagacttcttgtgtcataagtgctatggatgatggtgacaatttatctggccatgtcggttcccctaatccagcttgcgaggtaaaacttgtggatgttcccgaaatgaattacacatcagacgatcaaccatacccacgtggtgaaatctgtgtaagaggaccaatcatcttcaaaggctactacaaagatgaagaacaaacgagagaaattcttgatggagatggctggctacacacaggagatatcgggttgtggttacctggtggtcggctcaagatcatagacaggaagaagaacatatttaagttggcgcaaggagaatatatagcaccagagaagatcgaaaatgtttataccaaatgtagattcgtttcgcagtgtttcattcacggtgatagcttcaattcctctctagtagctatagtttcagtcgaccccgaagttatgaaagattgggctgcatcagaaggcatcaagtatgagcatctaggacagctctgtaacgatccaagagtgcgaaagactgttcttgctgagatggatgaccttggaagagaagctcagttgagagggtttgagtttgcaaaggctgtgactttggtgccagaaccattcaccttggagaatggacttctcacaccaacattcaagataaagagacctcaagcaaaagcctactttgcagaagcaattagcaaaatgtatgcggaaatcgcagcctcgaaccccattccttctaaactgtgatgctttttgctttgcttaaaagtgtttctttttttttgtattacaaaggtaattgtagaactgttaaaagatcggattaggatgaggtagatcgatcatttgaaataaaacagattcatggtgtaattttctttgatactgttttccagaataaaggaagcagactatgtcctaatcctgaaatggatgatgagtgtggtcataagttcg

SEQ ID NO: 34454 - protein, 700 aa, Arabidopsis thaliana
  misc_feature (1)..(700): Ceres Seq. ID no. 13606244
MEFASPEQRRLETIRSHIDTSPTNDQSSSLFLNATASSASPFFKEDSYSVVLPEKLDTGKWNVYRSKRSPTKLVSRFPDHPEIGTLHDNFVHAVETYAENKYLGTRVRSDGTIGEYSWMTYGEAASERQAIGSGLLFHGVNQGDCVGLYFINRPEWLVVDHACAAYSFVSVPLYDTLGPDAVKFVVNHANLQAIFCVPQTLNILLSFLAEIPSIRLIVVVGGADEHLPSLPRGTGVTIVSYQKLLSQGRSSLHPFSPPKPEDIATICYTSGTTGTPKGVVLTHGNLIANVAGSSVEAEFFPSDVYISYLPLAHIYERANQIMGVYGGVAVGFYQGDVFKLMDDFAVLRPTIFCSVPRLYNRIYDGITSAVKSSGVVKKRLFEIAYNSKKQAIINGRTPSAFWDKLVFNKIKEKLGGRVRFMGSGASPLSPDVMDFLRICFGCSVREGYGMTETSCVISAMDDGDNLSGHVGSPNPACEVKLVDVPEMNYTSDDQPYPRGEICVRGPIIFKGYYKDEEQTREILDGDGWLHTGDIGLWLPGGRLKIIDRKKNIFKLAQGEYIAPEKIENVYTKCRFVSQCFIHGDSFNSSLVAIVSVDPEVMKDWAASEGIKYEHLGQLCNDPRVRKTVLAEMDDLGREAQLRGFEFAKAVTLVPEPFTLENGLLTPTFKIKRPQAKAYFAEAISKMYAEIAASNPIPSKL

SEQ ID NO: 34455 - protein, 582 aa, Arabidopsis thaliana
  misc_feature (1)..(582): Ceres Seq. ID no. 13606245
MTYGEAASERQAIGSGLLFHGVNQGDCVGLYFINRPEWLVVDHACAAYSFVSVPLYDTLGPDAVKFVVNHANLQAIFCVPQTLNILLSFLAEIPSIRLIVVVGGADEHLPSLPRGTGVTIVSYQKLLSQGRSSLHPFSPPKPEDIATICYTSGTTGTPKGVVLTHGNLIANVAGSSVEAEFFPSDVYISYLPLAHIYERANQIMGVYGGVAVGFYQGDVFKLMDDFAVLRPTIFCSVPRLYNRIYDGITSAVKSSGVVKKRLFEIAYNSKKQAIINGRTPSAFWDKLVFNKIKEKLGGRVRFMGSGASPLSPDVMDFLRICFGCSVREGYGMTETSCVISAMDDGDNLSGHVGSPNPACEVKLVDVPEMNYTSDDQPYPRGEICVRGPIIFKGYYKDEEQTREILDGDGWLHTGDIGLWLPGGRLKIIDRKKNIFKLAQGEYIAPEKIENVYTKCRFVSQCFIHGDSFNSSLVAIVSVDPEVMKDWAASEGIKYEHLGQLCNDPRVRKTVLAEMDDLGREAQLRGFEFAKAVTLVPEPFTLENGLLTPTFKIKRPQAKAYFAEAISKMYAEIAASNPIPSKL

SEQ ID NO: 34456 - protein, 379 aa, Arabidopsis thaliana
  misc_feature (1)..(379): Ceres Seq. ID no. 13606246
MGVYGGVAVGFYQGDVFKLMDDFAVLRPTIFCSVPRLYNRIYDGITSAVKSSGVVKKRLFEIAYNSKKQAIINGRTPSAFWDKLVFNKIKEKLGGRVRFMGSGASPLSPDVMDFLRICFGCSVREGYGMTETSCVISAMDDGDNLSGHVGSPNPACEVKLVDVPEMNYTSDDQPYPRGEICVRGPIIFKGYYKDEEQTREILDGDGWLHTGDIGLWLPGGRLKIIDRKKNIFKLAQGEYIAPEKIENVYTKCRFVSQCFIHGDSFNSSLVAIVSVDPEVMKDWAASEGIKYEHLGQLCNDPRVRKTVLAEMDDLGREAQLRGFEFAKAVTLVPEPFTLENGLLTPTFKIKRPQAKAYFAEAISKMYAEIAASNPIPSKL

SEQ ID NO: 34457 - DNA, 1748 bp, Arabidopsis thaliana
  misc_feature (1)..(1748): Ceres Seq. ID no. 13606275
aacactcctttatagcttttctccgcctcaactttttgcttcttctctctcgatttgctctcacggaagattcttcagaatatctgatccgatatcagaagccccaagttcgcttgaattccgtctgagcaatggctttggtcttgcacacgtacaagggaaacaaaagtgctgagaaggcactcattgcagcagagtacgttggtgtgcagatcgatgtgccctctgactttcagatgggtgtcactaacaaaacccctgcgttcctcaagatgaaccctattggaaaggttcctgtacttgagactcccgagggttcagtatttgaaagcaacgcaattgcccgttatgtaagccgattgaatggtgacaactctttgaacggatcctccctgatcgaatatgcacaaattgagcaatggattgatttctcttcattggagatctatgcaagtatcttgaggtggttcggcccaagaatgggctttatgccatacagtgctccggctgaagaaggtgcgatctctacgttgaagagagcacttgatgctctgaacacacatctcacgtctaacacttaccttgtcggacactctattacccttgctgatatcatcactgtctgcaacttgaacttgggatttgctactgtcatgaccaagaaatttacctctgaatttcctcatgttgagaggtacttctggactgtggttaaccaaccaaacttcactaaagtgttgggtgatgtcaaacagactgaagctgtccctcctattgcttccaagaaagctgcccagcctgcaaagcccaaagaagagcctaagaaaaaggaagccccagtagcagaggcacctaagcttgctgaagaggaagaggcaccaaagcccaaagccaagaaccctcttgacttgctaccaccaagccctatggttctagatgattggaagaggctttactcaaacaccaaatctaacttccgcgaggttgctattaaaggattctgggacatgtatgacccagagggatactcactatggttctgtgactacaagtacaacgatgagaacatggtgtcatttgtcacgctcaacaaggttggtgggttccttcagcgtatggacttggcacgtaaatactcctttggaaagatgctgatttgtgggtcagagggtccgttcaaggtgaagggtttatggctgttccgtggaccagagatcccaaagttcataatggacgaggtgtacgacatggagctgtatgagtggactaaggttgatatctcagatgaagcccagaaggagcgtgttagccagatgattgaagacgcagagccatttgaaggtgaggctctcttggacgccaagtgcttcaagtgagaagagagaatggtttggtacttccatttacaggttttgcagctggggctttacatatctttctatctgtctgtctcacataggggttttgctctgtgacgtgtcgcatagactgtttttttcttttctaatcgagtgtcaaggacaagtctttttagttctttgttaatgtttcgcctccgtccagaattgtttactataccagttttcgaaatcctgaccggccagtctaccctggcaataggcaatacatggtctggtttatttgttttacggtaattttgccttgattgattttctttgacgcgtttcggtcaacttatatacattggtctttgagttgaacatttagtggtaaagtctttttggcac

SEQ ID NO: 34458 - protein, 414 aa, Arabidopsis thaliana
  misc_feature (1)..(414): Ceres Seq. ID no. 13606276
MALVLHTYKGNKSAEKALIAAEYVGVQIDVPSDFQMGVTNKTPAFLKMNPIGKVPVLETPEGSVFESNAIARYVSRLNGDNSLNGSSLIEYAQIEQWIDFSSLEIYASILRWFGPRMGFMPYSAPAEEGAISTLKRALDALNTHLTSNTYLVGHSITLADIITVCNLNLGFATVMTKKFTSEFPHVERYFWTVVNQPNFTKVLGDVKQTEAVPPIASKKAAQPAKPKEEPKKKEAPVAEAPKLAEEEEAPKPKAKNPLDLLPPSPMVLDDWKRLYSNTKSNFREVAIKGFWDMYDPEGYSLWFCDYKYNDENMVSFVTLNKVGGFLQRMDLARKYSFGKMLICGSEGPFKVKGLWLFRGPEIPKFIMDEVYDMELYEWTKVDISDEAQKERVSQMIEDAEPFEGEALLDAKCFK

SEQ ID NO: 34459 - protein, 379 aa, Arabidopsis thaliana
  misc_feature (1)..(379): Ceres Seq. ID no. 13606277
MGVTNKTPAFLKMNPIGKVPVLETPEGSVFESNAIARYVSRLNGDNSLNGSSLIEYAQIEQWIDFSSLEIYASILRWFGPRMGFMPYSAPAEEGAISTLKRALDALNTHLTSNTYLVGHSITLADIITVCNLNLGFATVMTKKFTSEFPHVERYFWTVVNQPNFTKVLGDVKQTEAVPPIASKKAAQPAKPKEEPKKKEAPVAEAPKLAEEEEAPKPKAKNPLDLLPPSPMVLDDWKRLYSNTKSNFREVAIKGFWDMYDPEGYSLWFCDYKYNDENMVSFVTLNKVGGFLQRMDLARKYSFGKMLICGSEGPFKVKGLWLFRGPEIPKFIMDEVYDMELYEWTKVDISDEAQKERVSQMIEDAEPFEGEALLDAKCFK

SEQ ID NO: 34460 - protein, 367 aa, Arabidopsis thaliana
  misc_feature (1)..(367): Ceres Seq. ID no. 13606278
MNPIGKVPVLETPEGSVFESNAIARYVSRLNGDNSLNGSSLIEYAQIEQWIDFSSLEIYASILRWFGPRMGFMPYSAPAEEGAISTLKRALDALNTHLTSNTYLVGHSITLADIITVCNLNLGFATVMTKKFTSEFPHVERYFWTVVNQPNFTKVLGDVKQTEAVPPIASKKAAQPAKPKEEPKKKEAPVAEAPKLAEEEEAPKPKAKNPLDLLPPSPMVLDDWKRLYSNTKSNFREVAIKGFWDMYDPEGYSLWFCDYKYNDENMVSFVTLNKVGGFLQRMDLARKYSFGKMLICGSEGPFKVKGLWLFRGPEIPKFIMDEVYDMELYEWTKVDISDEAQKERVSQMIEDAEPFEGEALLDAKCFK

SEQ ID NO: 34461 - DNA, 3251 bp, Arabidopsis thaliana
  misc_feature (1)..(3251): Ceres Seq. ID no. 13606288
ctctctctcttctcctctaaccaaatttcccgatgtgaaaaaacaagtttccgatcaactcaaaccaccgtcaccacttcttctctccgacatggctccgtcgttaaggaatttcaacttctttcaccgcttctccaccttcctcgtcttctctctattctccgtcgtttcttccgacgatctccaagtcttactcaagctcaaatcatcattcgccgattccaatctcgccgtgttcgattcctggaaactgaactccggtatcggtccttgtagcttcatcggagtaacctgtaattctagaggcaacgttacagagattgatctctctcgtcgaggtttatctgggaattttccattcgattcggtttgtgagattcagagtctcgagaaactctctctcggattcaattcactatctggaataatccccagcgatttgaaaaactgcacgagtttgaagtatttggatctcggcaacaatttattctccggtgctttccctgagttctcatctttaaatcagttacagtttctgtatctcaacaacagcgctttttccggcgtctttccgtggaaatcgctccgaaacgcaacgagtctcgtcgttttgagcctaggcgataatccgtttgatgcgacggctgatttcccggtggaggttgtttctctgaagaaactctcgtggctttacttgtcgaattgcagtatcgccggaaaaattccaccggcgattggagatttgacggagcttcggaatttggagatttccgatagcggattaaccggagagattccgtcggagatttcgaaacttactaatctctggcagttagagctttacaacaactccttgaccggaaaacttcctaccggattcggaaacttgaagaatctgacttacttggacgcttcaacaaatcttctacaaggcgatttatcggagcttaggtctctgactaatctcgtttcactacaaatgttcgaaaacgaattctccggtgagattccgctggagtttggtgaattcaaggatctcgtgaatctctctctgtatacaaacaagttaaccggttctctgcctcaaggactcggttcacttgctgattttgatttcatcgacgcatcagagaatctcttaaccggaccgatccctccagatatgtgcaagaacgggaagatgaaagctctgcttctcctgcaaaacaacctcactggctctatccctgagtcctacgctaactgtttgactctgcaacggttcagagttagcgagaacaacctcaacggaactgttcccgcgggactttggggattaccgaagctcgagatcatcgatatagagatgaataacttcgaaggtccaatcaccgcggatataaagaacggtaaaatgctcggagcgttgtatctagggttcaacaagttgtctgatgagctgcctgaagagataggtgacactgaatctttgactaaggttgagcttaacaataaccggtttaccgggaagattcctagctccattgggaaactcaaaggacttagcagtctaaagatgcagagcaatggcttctccggtgagatacctgactcgattggttcgtgctcgatgctcagcgatgtcaacatggctcaaaactcgatatccggagaaatcccccacacgcttggatcactcccgacgctcaacgctttgaatctttcggacaataagttgtctgggagaatcccagagagtttgtcgtctttaaggcttagccttcttgatctgtctaacaacagattatcaggtcgtatccctctgagtttgtcatcatataatggtagcttcaatggcaatcctggcctctgtagcacgacgatcaaatcgtttaaccggtgcataaatccttcgagatcgcatggagacactcgcgtgttcgtgttgtgtatagttttcgggttactgatcttgctagcgtctcttgtgtttttcttgtacctgaagaaaacagagaagaaggagggacgttcgcttaaacacgaatcttggagtataaagtcattccgaaagatgagtttcactgaagatgatatcattgattcaatcaaagaagagaatttgattggtagaggaggttgtggggatgtgtacagagtagtacttggtgatggtaaagaagttgcggtcaaacacatccggtgtagtagtactcagaaaaacttcagcagtgcaatgccgattctcactgaacgggagggaagatcgaaagagtttgaaacagaggtgcaaacgcttagttcgatacgacacttaaacgtggtgaaactctattgtagcatcacgagcgatgactcgagcttgctggtgtacgagtacttgcctaatggaagcttatgggacatgcttcactcttgcaagaagtcgaatcttggttgggaaacacggtatgatatagctcttggtgcagcaaaagggcttgagtacttgcatcatgggtatgagagaccggtgattcaccgtgatgttaagtccagtaacatattgctagatgagttcttgaaacctagaattgcggattttggtcttgccaagattcttcaggccagcaatggcggtccagagtccacgcatgtcgttgcgggaacctatggctacatagctccagcagagtatggatatgcgtcaaaagtgactgagaaatgcgatgtatatagcttcggggtcgtgttgatggagctagtcacagggaaaaaaccgatagaggcagagtttggagagagcaaagacatagtgaattgggtgagcaacaatctgaagagcaaagagagtgtgatggagattgtggacaagaagataggagaaatgtatagagaagacgcggtcaagatgctgaggattgcgatcatctgcaccgcaagacttcctggactaagaccgacgatgaggagcgtggtgcagatgatcgaggacgcggaaccttgcagattgatggggattgtgatcagcaaagagagtgatgtcaaggtcaaagaaataagttgatgattgagggaccaagtcactcttttggggtctgttttgttcacaatgaaacttagggagatcgagtaaagtggatcatctaaatctattaagacgtacgtaagagtttagatggagagtgttgtaatactagtactccgggttatgaaatcataggtgttgtaacgatctcattgtaaactattttcttgtaattgtagaattttaaggttttcaaatgttcatg

SEQ ID NO: 34462 - protein, 1007 aa, Arabidopsis thaliana
  misc_feature (1)..(1007): Ceres Seq. ID no. 13606289
SLSSPLTKFPDVKKQVSDQLKPPSPLLLSDMAPSLRNFNFFHRFSTFLVFSLFSVVSSDDLQVLLKLKSSFADSNLAVFDSWKLNSGIGPCSFIGVTCNSRGNVTEIDLSRRGLSGNFPFDSVCEIQSLEKLSLGFNSLSGIIPSDLKNCTSLKYLDLGNNLFSGAFPEFSSLNQLQFLYLNNSAFSGVFPWKSLRNATSLVVLSLGDNPFDATADFPVEVVSLKKLSWLYLSNCSIAGKIPPAIGDLTELRNLEISDSGLTGEIPSEISKLTNLWQLELYNNSLTGKLPTGFGNLKNLTYLDASTNLLQGDLSELRSLTNLVSLQMFENEFSGEIPLEFGEFKDLVNLSLYTNKLTGSLPQGLGSLADFDFIDASENLLTGPIPPDMCKNGKMKALLLLQNNLTGSIPESYANCLTLQRFRVSENNLNGTVPAGLWGLPKLEIIDIEMNNFEGPITADIKNGKMLGALYLGFNKLSDELPEEIGDTESLTKVELNNNRFTGKIPSSIGKLKGLSSLKMQSNGFSGEIPDSIGSCSMLSDVNMAQNSISGEIPHTLGSLPTLNALNLSDNKLSGRIPESLSSLRLSLLDLSNNRLSGRIPLSLSSYNGSFNGNPGLCSTTIKSFNRCINPSRSHGDTRVFVLCIVFGLLILLASLVFFLYLKKTEKKEGRSLKHESWSIKSFRKMSFTEDDIIDSIKEENLIGRGGCGDVYRVVLGDGKEVAVKHIRCSSTQKNFSSAMPILTEREGRSKEFETEVQTLSSIRHLNVVKLYCSITSDDSSLLVYEYLPNGSLWDMLHSCKKSNLGWETRYDIALGAAKGLEYLHHGYERPVIHRDVKSSNILLDEFLKPRIADFGLAKILQASNGGPESTHVVAGTYGYIAPAEYGYASKVTEKCDVYSFGVVLMELVTGKKPIEAEFGESKDIVNWVSNNLKSKESVMEIVDKKIGEMYREDAVKMLRIAIICTARLPGLRPTMRSVVQMIEDAEPCRLMGIVISKESDVKVKEIS

SEQ ID NO: 34463 - protein, 977 aa, Arabidopsis thaliana
  misc_feature (1)..(977): Ceres Seq. ID no. 13606290
MAPSLRNFNFFHRFSTFLVFSLFSVVSSDDLQVLLKLKSSFADSNLAVFDSWKLNSGIGPCSFIGVTCNSRGNVTEIDLSRRGLSGNFPFDSVCEIQSLEKLSLGFNSLSGIIPSDLKNCTSLKYLDLGNNLFSGAFPEFSSLNQLQFLYLNNSAFSGVFPWKSLRNATSLVVLSLGDNPFDATADFPVEVVSLKKLSWLYLSNCSIAGKIPPAIGDLTELRNLEISDSGLTGEIPSEISKLTNLWQLELYNNSLTGKLPTGFGNLKNLTYLDASTNLLQGDLSELRSLTNLVSLQMFENEFSGEIPLEFGEFKDLVNLSLYTNKLTGSLPQGLGSLADFDFIDASENLLTGPIPPDMCKNGKMKALLLLQNNLTGSIPESYANCLTLQRFRVSENNLNGTVPAGLWGLPKLEIIDIEMNNFEGPITADIKNGKMLGALYLGFNKLSDELPEEIGDTESLTKVELNNNRFTGKIPSSIGKLKGLSSLKMQSNGFSGEIPDSIGSCSMLSDVNMAQNSISGEIPHTLGSLPTLNALNLSDNKLSGRIPESLSSLRLSLLDLSNNRLSGRIPLSLSSYNGSFNGNPGLCSTTIKSFNRCINPSRSHGDTRVFVLCIVFGLLILLASLVFFLYLKKTEKKEGRSLKHESWSIKSFRKMSFTEDDIIDSIKEENLIGRGGCGDVYRVVLGDGKEVAVKHIRCSSTQKNFSSAMPILTEREGRSKEFETEVQTLSSIRHLNVVKLYCSITSDDSSLLVYEYLPNGSLWDMLHSCKKSNLGWETRYDIALGAAKGLEYLHHGYERPVIHRDVKSSNILLDEFLKPRIADFGLAKILQASNGGPESTHVVAGTYGYIAPAEYGYASKVTEKCDVYSFGVVLMELVTGKKPIEAEFGESKDIVNWVSNNLKSKESVMEIVDKKIGEMYREDAVKMLRIAIICTARLPGLRPTMRSVVQMIEDAEPCRLMGIVISKESDVKVKEIS

SEQ ID NO: 34464 - protein, 681 aa, Arabidopsis thaliana
  misc_feature (1)..(681): Ceres Seq. ID no. 13606291
MFENEFSGEIPLEFGEFKDLVNLSLYTNKLTGSLPQGLGSLADFDFIDASENLLTGPIPPDMCKNGKMKALLLLQNNLTGSIPESYANCLTLQRFRVSENNLNGTVPAGLWGLPKLEIIDIEMNNFEGPITADIKNGKMLGALYLGFNKLSDELPEEIGDTESLTKVELNNNRFTGKIPSSIGKLKGLSSLKMQSNGFSGEIPDSIGSCSMLSDVNMAQNSISGEIPHTLGSLPTLNALNLSDNKLSGRIPESLSSLRLSLLDLSNNRLSGRIPLSLSSYNGSFNGNPGLCSTTIKSFNRCINPSRSHGDTRVFVLCIVFGLLILLASLVFFLYLKKTEKKEGRSLKHESWSIKSFRKMSFTEDDIIDSIKEENLIGRGGCGDVYRVVLGDGKEVAVKHIRCSSTQKNFSSAMPILTEREGRSKEFETEVQTLSSIRHLNVVKLYCSITSDDSSLLVYEYLPNGSLWDMLHSCKKSNLGWETRYDIALGAAKGLEYLHHGYERPVIHRDVKSSNILLDEFLKPRIADFGLAKILQASNGGPESTHVVAGTYGYIAPAEYGYASKVTEKCDVYSFGVVLMELVTGKKPIEAEFGESKDIVNWVSNNLKSKESVMEIVDKKIGEMYREDAVKMLRIAIICTARLPGLRPTMRSVVQMIEDAEPCRLMGIVISKESDVKVKEIS

SEQ ID NO: 34465 - DNA, 1287 bp, Arabidopsis thaliana
  misc_feature (1)..(1287): Ceres Seq. ID no. 13606300
atgggtggtgagagtaatgaaggaggagagatgggctttaagcatggagatgatgagagtggtgggatctctagagttggaattacatcaatgcccttgtatgcaaaggcagatcctttcttctcttctgcagattgggatccagttgtcaatgctgctgctgctggcttctccagctctcattaccatccttccatggcgatggataatccagggatgagttgcttctctcattaccaacccggttctgtttccggttttgcagcagacatgcctgctagtcttcttccgtttggtgattgtggtggtggtcaaattggtcattttcttggttcagacaagaaaggggaaagattgatcagagctggagaatcatctcatgaggatcatcatcaggtttcagatgatgctgttcttggtgcttccccagttgggaaaagaaggctacctgaagccgaatcacaatggaacaagaaagctgtggaggaatttcaagaagaccctcaaaggggaaatgatcagagccagaagaagcataaaaatgatcagagtaaagagacggtgaacaaggagagctcacaaagtgaagaagcaccgaaagaaaactacattcatatgagggcaagaagaggtcaagccactaatagtcacagtcttgcagagcgggttagaagagaaaagatcagtgaaaggatgagattgcttcaagaacttgttcccggatgcaacaagatcaccggaaaagcggttatgctcgatgaaataatcaactatgttcagtcattgcaacagcaagttgagtttttgtctatgaaacttgcgacggtgaatccagagatcaatattgatatagacaggattctcgccaaagatcttctgcagtcaagagacagaaacactcctacactcgggctgaatccttttgccggttttcaagggaacataccaaacctttctgccaccacaaatccacaatacaacccactacctcagacaacactagagagtgaactacaaaacctttaccagatgggattcgtctcaaatccatcgactatgtccagtttctcacctaatggtcgattgaaacctgagctctagtacttcaaggacacggaaaatttgcagggagtttgtatagaagatggctttggttctaagtatcatatgtgttcgttcttccatattatttgttctaagcacaaggatttggattctcagttgttgttgtttttgcttttcctcaacgaagaatacatttattatatatggaaatcagatttatct

SEQ ID NO: 34466 - protein, 366 aa, Arabidopsis thaliana
  misc_feature (1)..(366): Ceres Seq. ID no. 13606301
MGGESNEGGEMGFKHGDDESGGISRVGITSMPLYAKADPFFSSADWDPVVNAAAAGFSSSHYHPSMAMDNPGMSCFSHYQPGSVSGFAADMPASLLPFGDCGGGQIGHFLGSDKKGERLIRAGESSHEDHHQVSDDAVLGASPVGKRRLPEAESQWNKKAVEEFQEDPQRGNDQSQKKHKNDQSKETVNKESSQSEEAPKENYIHMRARRGQATNSHSLAERVRREKISERMRLLQELVPGCNKITGKAVMLDEIINYVQSLQQQVEFLSMKLATVNPEINIDIDRILAKDLLQSRDRNTPTLGLNPFAGFQGNIPNLSATTNPQYNPLPQTTLESELQNLYQMGFVSNPSTMSSFSPNGRLKPEL

SEQ ID NO: 34467 - protein, 356 aa, Arabidopsis thaliana
  misc_feature (1)..(356): Ceres Seq. ID no. 13606302
MGFKHGDDESGGISRVGITSMPLYAKADPFFSSADWDPVVNAAAAGFSSSHYHPSMAMDNPGMSCFSHYQPGSVSGFAADMPASLLPFGDCGGGQIGHFLGSDKKGERLIRAGESSHEDHHQVSDDAVLGASPVGKRRLPEAESQWNKKAVEEFQEDPQRGNDQSQKKHKNDQSKETVNKESSQSEEAPKENYIHMRARRGQATNSHSLAERVRREKISERMRLLQELVPGCNKITGKAVMLDEIINYVQSLQQQVEFLSMKLATVNPEINIDIDRILAKDLLQSRDRNTPTLGLNPFAGFQGNIPNLSATTNPQYNPLPQTTLESELQNLYQMGFVSNPSTMSSFSPNGRLKPEL

SEQ ID NO: 34468 - protein, 336 aa, Arabidopsis thaliana
  misc_feature (1)..(336): Ceres Seq. ID no. 13606303
MPLYAKADPFFSSADWDPVVNAAAAGFSSSHYHPSMAMDNPGMSCFSHYQPGSVSGFAADMPASLLPFGDCGGGQIGHFLGSDKKGERLIRAGESSHEDHHQVSDDAVLGASPVGKRRLPEAESQWNKKAVEEFQEDPQRGNDQSQKKHKNDQSKETVNKESSQSEEAPKENYIHMRARRGQATNSHSLAERVRREKISERMRLLQELVPGCNKITGKAVMLDEIINYVQSLQQQVEFLSMKLATVNPEINIDIDRILAKDLLQSRDRNTPTLGLNPFAGFQGNIPNLSATTNPQYNPLPQTTLESELQNLYQMGFVSNPSTMSSFSPNGRLKPEL

SEQ ID NO: 34469 - DNA, 1620 bp, Arabidopsis thaliana
  misc_feature (1)..(1620): Ceres Seq. ID no. 13606304
attcatgttattatggtcaacaacagaatctgaatcccatttccccattttcggatcacaataactaacaaaccctagatttctatctatagtccttcgatctgtttctgtgtctccttaaagctgtgatttttgcaattggggtttgtgagattcgatcaattaattgtgtttgttgaatggaccttcttcgattgagagaaaagggtatatttttatctcagagaagaaggaaatggctgatttttatggcgatctctggagtttctggctatggagcttacaaggtttatcatttgccatctgttgccagaaaaaggaagcgtctttttaagcttttcggagccattgtctctgtagctgaattgatctctgattcagctgagaccttaagtatggtatcacgagacgtgaaggattttctcaattcagattcagatgaaatccctaacagcttgaagcagatcgcgaagatcacaacttcgaatgagtttacggattcgctttctagggtttctcaggctgtgactattggtgcctttcgtgggtacaaatccgaatcgtctattggtgattcaggaattgagaaatcatcagactcgagtgttgttgatagagtgattgataaggttttctcagaggctggaactggttttgtttcagttgttgttggtagctttgctaagaatcttgttcttggattttactctggtaaggtagagagtggtgtgaaatgtgagggttctgattcttctgagacacctagatgggtgactttgcttggtgatgacaagtgtagagagcttttagctgattgtattgagagattcaccagcactgcaattggtgtgtatcttgacaagacgatggatatcaatacttatgatcaaatctttgaaggcttgacgaatccgaaacatcaggatagtgtcaaggacgttcttgtttcggtttgtaacggtgctctcgagactattgttaggacatctcacgacgtgtttacatcttcaaggtctaagaatgtgatagaagagatcgaagatgatgatttcaagagtaatggttccgcgagaagcaagatggtttcggaatcaggagatggggtcaagagtaatgggtggactgaggctattgcaactacattggcagttccgagcaatcggaggtttatgtttgatgtaacaggaagagtaacactagaaacgacgagatcaatcatcgcatttataatggtgaagacatttcaagggttcagaaaaagtatcaatgtggttcatgaagaggttacagacagaggacgccaagcagttgaatatgttggagccaaatcttctgttataatcactgtatgccttgcgttgtacttgcacatcataagcggctgtgttcggaattctcccataggcgtaagccagcatttttagttcttcagatgaagaagagatcatcgatttggttggatataggataatatttgttaggtacacaagatttatcagctcgttgtttatagttggagctgagaatattgtaaagattgtgtgcgtgtattagcacaacttgattcttattgatggatcatggatcttatatatatatacatattgaaaaggttcttgg

SEQ ID NO: 34470 - protein, 414 aa, Arabidopsis thaliana
  misc_feature (1)..(414): Ceres Seq. ID no. 13606305
MDLLRLREKGIFLSQRRRKWLIFMAISGVSGYGAYKVYHLPSVARKRKRLFKLFGAIVSVAELISDSAETLSMVSRDVKDFLNSDSDEIPNSLKQIAKITTSNEFTDSLSRVSQAVTIGAFRGYKSESSIGDSGIEKSSDSSVVDRVIDKVFSEAGTGFVSVVVGSFAKNLVLGFYSGKVESGVKCEGSDSSETPRWVTLLGDDKCRELLADCIERFTSTAIGVYLDKTMDINTYDQIFEGLTNPKHQDSVKDVLVSVCNGALETIVRTSHDVFTSSRSKNVIEEIEDDDFKSNGSARSKMVSESGDGVKSNGWTEAIATTLAVPSNRRFMFDVTGRVTLETTRSIIAFIMVKTFQGFRKSINVVHEEVTDRGRQAVEYVGAKSSVIITVCLALYLHIISGCVRNSPIGVSQHF

SEQ ID NO: 34471 - protein, 391 aa, Arabidopsis thaliana
  misc_feature (1)..(391): Ceres Seq. ID no. 13606306
MAISGVSGYGAYKVYHLPSVARKRKRLFKLFGAIVSVAELISDSAETLSMVSRDVKDFLNSDSDEIPNSLKQIAKITTSNEFTDSLSRVSQAVTIGAFRGYKSESSIGDSGIEKSSDSSVVDRVIDKVFSEAGTGFVSVVVGSFAKNLVLGFYSGKVESGVKCEGSDSSETPRWVTLLGDDKCRELLADCIERFTSTAIGVYLDKTMDINTYDQIFEGLTNPKHQDSVKDVLVSVCNGALETIVRTSHDVFTSSRSKNVIEEIEDDDFKSNGSARSKMVSESGDGVKSNGWTEAIATTLAVPSNRRFMFDVTGRVTLETTRSIIAFIMVKTFQGFRKSINVVHEEVTDRGRQAVEYVGAKSSVIITVCLALYLHIISGCVRNSPIGVSQHF
